United States Patent Application Publication US 2007/0048740 A1 - sequence listing, part 4

SEQ ID NO: 1920 - DNA, 4067 bp, Homo sapiens
ttaaagttgagtattattccagtgtgtgcagtatgtatacacacgtatgcacatgtacccatgtatgtgtgcacacgtgtgcacatgtacccgggtatgtgtgcacgcgtgtgcacgcgtacccgggtatgtatgcacgcgtgtgcacacgtacccgggtatgtgtgcacgcgtgtgcacgcgtacccgggtatgtgtgcacgcgtgtgcacgcgtacccatgtgtgtacacgtatacacgcgtaccatgtgtgtatgcgcacgtatacacatgtatgtatagatgtatacatatgcacacttatgaatacatgtgtatctacatgtgcgcatgcacacatgtatatgcacatgtgtatacaggcatgtatatgtgtgtgcttacctacgaatatacatacatacacatatctgtatgcatatacacacgtacatatcgatatgtgtatgtatacatatgtgtccggaattggtgggttcttgatcttgctgacttcaagaatgaagctgcggaccctcgtggtgagtgttacagctcttaaagatggtgtgtctggagtttgttccttcagatgttcatatgtgtccggagtttcttccttctgctgggttcgtggtctcgctgacttcaggggtgaagctgcagacctttgcagtgagtgttacagctcttaaagacagcacgtccggagttgtttgttccttctggtgagtttatggtcttgctggcttcaggagtgaagcttcagatcttcgcagtgagtgttacagctcataaaggcagcgtggacctaaagagtgaccagcagcaagatttattgcgaagagcgaatgaacatagctttcacagtgtggaaggggaggtaagtggagtgggttgccgctcctggcttggttggcctacttttattcccttatctggccccacccacatcctgctgattggtccattttactgtgagctcgttggtccattttatagagagttgattggtccgttttacagagagctgattggtgtgtttacatacctttagctagacacagagtgctgattggtgcgtttacaaacctctagctagacacagagtgctgattggtacatttacaaacctttagctagacacagagtgccgattggtgcatttacaatcttttagctagacacaaaagttgtccaagtccccaccagattaactagacacagagcgctgattggtgcgtttataaacctttagctagacacagagtgctgattggtgcatttacaaacctctagctagacacagagtgctgattggtgtgtttacaatcctttagctagacacaaaagttctccaagtccccacctgacccagaagcccagctggcttcacctctcaatggcactctccgcgggactttgcagcacctagcccgggcactctggcagcccagagggagctcatcccccaatcaagcccagcaggcactgagcccctgaccacccggaacccgcaccggcctgcgaatgccacgtgcagccccagctcccgccggcacctctccctccacacctccccaagagcagagggagctggttacagactcggccagccccagagtggggcccccacagcacagcgacaggctgaagagctcctcaagtgcggccagagcggacgcggaggccgaggaggtgccaagagccagtgagggctgctagcacgttgtcactgctcacatatgcacgtatatacacgtgtatacatatacatatgtatatacttgtatatacatatgtatatacttgtgtatgtattcatgtgtgtatacgtgtatataggtgtacagatgtatatagtatgtatgtgtacatgcatgtgtacatgtatacattatatacagtttacatgtatgtatatatgtacacatgtattccagtgtgtgtatatgtacacataatatatacatatatgtatattcatatgcacgcatatgcgtgcatatgtatattcatatgcgcgcatatgcatgcatatgtatattcatatacacgcatatgcatgcatgtgtatattcatatacacgcatatgcatgcatgtgtatattcatgtacacgcatatgcatacatatgtatattcatatgcacgcatatgcatacatatgtatattcatatgcacgcatatgcatacatatgtatattcatatacacgcatatgcatacatatgtatgttcatatacacgcatatgcatacatatgtatattcatatacacgcatatgcatacatatatgtatattcatatgcacgcatatgcatacatatatgtatattcatatacacgcatatgcatacatatatgtatattcatatgcacgcatatgcatacatatatgtgtattcatatgtacacatgcatacatatatgtgtattcatgtgtacaatgcatgcatatgtgtattcatatgtacacatgcatgcatatgtgtgtgttcatatgtacacatgcgtgcatatgtgtattcacaagtacacatgcatgcatatgtgtattcacatgtacacatgtatacataggtgtatattcatatatacatatgtatacatatgtgtgtatattcatatatacatatgtatacatgtgtgtgtatattcatatatacatatgtatacatatgtgtatattcatgtatacataggtatacatatgtgtgtatattcatatatgcataggtatacatatgtgtatattcatatatgcatatgtgtacatatatacacacatatacatatacatacacacaactttaaccatttgtctattgatgaacacagtttgtttctctatcttggctactgggaataacgcttcaatgaacatggcagtgcagatatatctgagatactgatttcatttcctttggatgtatgcacagaagtgggattgctaaatcattcagtagttctatttttagtttttggaggaaactccatactgttttccataatggttgtgccgatttacaattgtacccttttcttcacatcctcaccaacacttaattattttttgattttgtgataatagccatcctagtaggtttgcggtcttatctcattgtggttttgatttgcagttccctgatgactagtgatgttgagcaccttttcatatacctgttggcaatctgtatgtcttctttggaaaaatgtcttttcaggtcctttgctctatttttaatcacgttatgagttgcatgagttccttatgcattttggatattaagcccctatcagatatatggtttgctgtgcaggaattttttagtttgatgtagtgctacttatttgtgtttgactttgttgcctgtgcttttggtgtcatacccccaaaaattattggcaagcccagtgtcaaaaacttttcttctctcttttcttccaggatttttatagtatcaggacttgtatttaagtcttcaatccactttgagttgatttttgtatatggtgtgaaataagagtccattttcatcctatggcaagtaaatatccagttttcacaacaccgtttactgaagagaccatcctttccccaatgtgtgttcttggcacctttgttgaaaatgaatggactaaattcataacttggcctctgggctctctattctgtcccactggtctctgtgtctgtttttatggcagtaccatactgttttgactactatagctttgtaataaaattacagatgccttaccattccatgtcatttccttctgctctgtccacaccattttgaataatttattccttaaactcctttcagattaccaaagtatttcctaataattggttgtatgtgcattaaatatctctagaaggaaacacaaaaaaacaagtaatcattttctatgagctaggaaactgggtggggaaaaaaacttttcattgtatacttttacaattcttatttttgaataatgtggatgcattagctatatatgtgcatgcataatatatatacaaatatacataaatgtgtatgtagatatataaataaataaaatgcagtaatatct

SEQ ID NO: 1921 - DNA, 5277 bp, Homo sapiens
cagcagcaggggcacctggaccctgagggcaggaaccagaccttggctcctccacccaccccctcgttcctgatggggcagggaagtctcgggaccccatgatgggcgacatggcgatggtcactgtgggtgctttgctatcaggtgggggccttcctctccactccgggtccagtgtgagtggccgctatggcttcccctccactccaggttctatcgtgagtgggtgggtgctgcgtctgtggatgtcacgtgacctttcctctttagcctatcatcgtagttgggagttagttagcccgttgagcgtcattgaatttccagtgttgagccagccctgcgtgcccgggataaacccacctggccgtggtgtgtggccctgtttatgcacgtgggccctgattcgctgatgcctgcctgagggtttgcgcttatcggcgacatcagcctgcacttttcttttctcgtgatctctctggttctggcctcagggtgacgtgggcctcgtagggtcccgtggtggctcctccccagacggtgacatggagtgagcccattctccctcctgggagtgggtcactcaggccaccagagcaccacagggaaagcagccagggaggacacggaggcccttgaagctctggcctcttctgaggcctccaggacctgacagtgagtgggagcagccctggcagaacccctcccctcctctcggccgccctgacacctcatccccgacactcagagctcatcctccttcccagctgtttccaatttcaaagtgaactcgaccttgtggctccaggagatgcagcagggacagtgttaaatcggctttcaccagcccacacagccaggcatcctcctcggccctcctgggcactgggtggacaccactggctgtggcctggccctggcctggccctggccttctccagacagccctgtccaccccaaagcccagccaccctgggcctgcagcaggcctgtggagttctcagttgcgtggggaccagagggtgctggagaaacaaaccagacgcagctgaaggcagtcagggcagggcgcaatcagcgataagagctgcataggggccacagcgtaacctgagctccagtcggtggaaagaaaaggcagagacattgcagaggccaggtctgctcaggggaagacagttctgggtgtagaggactcacatcccagagaggctgaggaagggtttaccaccgcaagctttctcaggcgggctcttgaggggtggctggggtcttcctggcgacgggcctgcggcactggaagccctactggagtttggcctgtctccggcacaggtttggacggagctgttttgtgctgaaaggttttctcggggtccgtggtgtcccccaaaggtgccaccgtgcgggtctcctagctccctgccagcttcctgtccctgtgctcactgcccccacgcctcctgccaaggccgagccacacacccgctccacctgcatttcctctaccgactcgccagcccaaatgccgctcttcactctggcctcgctgagcggctgcccgaggaggagctctaggccgacgcccaccgcaggccttacagtcttctctggacgctcccttgcagatgcaccgtggcctggcggcgagcccccggtcaccttcctccgcacggaagaggggccggacgccaccttccccaggaccattcccctgatccaacagttgctaaacgccacggagctcacgcaggacccggccgcctactcccagctggtggccgtgctggtctacaccgccgagcgggccaagttcgccaccggggtagagcggcaggactggatggagctgttcattgacacctttaagctggtgcacagggacatcgtgggggaccccgagaccgcgctggccctctgctaaagcccgggcacccgcccagccgggctgggccctccctgccacactagcttcccagggctgcccccgacaggctggctctcagtggaggccagagatctggaatcggggtcagcggggctacagtccttccaggggctctggggcagctcccagcctcttcccatgctggtggccaccgtgtcccttgctgcggctgcatcttccagtctctcctccgtcttccagtggccgctctctttataagaaccctggtcattgaatttaaggcccaccccaagtccagaatgacctcgcaagacccttaactcactcccgtctgcagagtccttctttgctgcatcaggtcaccctcacaggctccagggtttgggtgtggaagtctttggaggcccttacttagcggcccagctgggctgccgtgcgtctgggatggggctgagggagggtgctgcccaggtgctggaggatgttccagcaccaggttccagcggagcctcggaaacaggccccagaggctggtgagcctcgctgggtgtgggcactaatcccgtgcatggtgactcgtgggcgctcacggcccacctggtggcaggtgaaggcttccggttgggcagcagatagtcctgggggaagctggcagtcctggcaccatgacgtatctgggctggtgtcatgcacagtagggcgaatggccacagctgcctgccagcagccctgatcccggggtgtctgcacccttccagcccaacctctgggtctccaaaagcacagtcgggggagcatccaccaggcacaacctctgcggtcctcagaggactgagcagagaatcccagggtccacaatgttggggagcggcagggatcaccatccaaagggagcggcccccacggcgagctgaccccgacgttctgactgcaggagccctcatccaggctgggctcctgccgggcacggctgtgaccatttctcagggccaggttctcgtccccacacccactgcacagggcaggccaggctggtcttcccactgtggggatgaaggatcctccacaggaggaggagagcagagtccacagacatcccaacagcctcagcctccctgtgcctggccggcccccacagcttccccgtctcctccaggccccacagacactgatgaatggacagagacccccaaaaccagctgccccttgcatgtctgtctccatatgtttggtgacagcagtgaaaatgttattagttttgagggggtttgggaagcccagcggtacctgaggagtttctggacatttaagccggttcctaggtgtggccttaacagggaggctgcccttcctttcactgaatgagctgcgtcactcataagctcactgagggaaccccatctgccagctcgtgcgtgctcagacgacgtccatgtctcaagcgttctgtgaaggctgcggtgcagcgtgaggtcaccctgctgtgttcagagctttgctcactgcctgcggggctggaccgttgcacctccagggcccccagaaaccgagtttcgggtcagggtcctctgtgtgcattcctgggggtccatgtaccagctgtgacgacgtccaggggttgggctgagaagcagacacccttggggaaactggctctgtccctcccctcccccatcccaggagctgaggtcttggtgaggccacagggccaggtccacgcaaggactgtccgtgtcctgtcctgtggtctctggccccacgtgacacccacacgtgtggtaggcagcctggcctgggttgtggctatggccaggcccccaagctgtccccgatgcccagggctggtgaccacccaggcaggtgggggccccacttggtaacagagtcatagggcagaacccacctgggctgccacagaaggtctggctgcccctgtgcccactgctccccaccatggccaatcagaagagtcaggggctcctggtctttccgggagggacgtggcccagccagctctgggtgttctgagcagctctgggacccagcgattgaggggtcaggctgggggtgtcagagccagggtcctccttaagtacctcccacactacacagacagtggcccttttgtgggcagcaaattcttgagccatgaaaggatgctttgggccccttccctcccaggagggcagcctgtgcagggatggtgctcagcaggtggacagggcctggggcctgtgtcagggtctcaggcctgggagcaccagcagaggagatggcggctcccagcagtgccgcctgaaagtgtcttgggctaaggacccacacccagggctgccctgcagaaacgcccccgcagagcccagtggtctgtgaggttgcaggcagggtgcgaatggaagggcacaggtgcggggctggcacctgcccggtcctgcccacctctcctccgcccagcccgcacctgcgtctccccacagagctgtccgtggcacagtgcacgcagcggcccgtggacatcgtcttcctgctggacggctccgagcggctgggtgagcagaacttccacaagtcccggcgcttcgtggagcaggtggcgcggcggctgacgctggcccggagggacgacgaccctctcaacgcacgcgtggcgctgctgcagtttggtggccccggcgagcagcaggtggccttcccgctgagccacaacctcacggccatccacgaggcgctggagaccacacaatacctgaactccttctcgcacgtgggcgcaggcgtggtgcacgccatcaatgccatcgtgcgcagcccgcgtggcggggcccggaggcacgcagagctgtccttcgtgttcctcacggacggcgtcacgggcaacgacagtctgcacgagtcggcgcactccatgcgcaagcagaacgtggtacccaccgtgctggccttgggcagcgacgtggacatggacgtgctcaccacgctcagcctgggtgaccgcgccgccgtgttccacgagaaggactatgacagcctggcgcaacccggcttcttcgaccgcttcatccgctggatctgctagcgccgccgcccgggccccgcagtcgagggtcgtgagcccaccccgtccatggtgctaagcgggcccgggtcccacacggccagcaccgctgctcactcggacgacgccctgggcctgcacctctccagctcctcccacggggtccccgtagccccggcccccgcccagccccaggtctccccaggccctccgcaggctgcccggcctccctccccctgcagccatcccaaggctcctgacctacctggcccctgagctctggagcaagccctgacccaataaaggctttgaaccc

SEQ ID NO: 1922 - DNA, 3415 bp, Homo sapiens
aggatctgcgcctgcgcaaattgtaggtcaagcttgggccggggttagggttgcacacgcgtaaattgtgggccgccgctgccgggctgattgagaggacagctcccgcaatctgcggtcgtatccgttccgtcaatgttttatttctgcttgtttttcaatgttgttgcacaaataacgacacctgaaaacaaaaccaggtatacttattattaaaaagtgttcgtcctgtgaatccgcaacattgggatgctcaatttatttgcctttataaggaccaaaacacgaagctattttttatttttatttatttattattttttgaaatggagtctcgctctgtcgcccaggctggagtgcagtggagcgatctcggctcactgcaacctccgtctcccgggttcaagcgattctcctgcctcggcctcccaaatagctgggattacaggcaagggtcaccacgcccgggtaatttttgtatttttagtagagacggggtttcaccacgttggccaggctggtctcgaactgctgacctcaggtgatccacccgcctcggcctcccaaagtgctgggattacaggcgtgagccacgcgcccggccggaagctcctttctgtttttgttttgttttgtttttttgagacaggctcgctctgtcgcccaggctggagtgcagtggcgcgatctcggctcactgcaacctccgcctcccgcgttcaagccattctcctgcctcagcctcccgagtagctgggactacaggcgcccgccaccacgcctggctaattttttgtatttttagcagagatgggggtttcaccgtgtaagccaggatggtctcgatctcctgacctcatgatccgcccgcctcggcctcccaaattgctgggattacaggcgtgagccaccgcgcccgaccccggaagctcctttttaagtgtgatttattaagggcggcttgtgctagcagtgaggcgttaagcctgaaagtgaaaaaacccaaaacactcactgctcttttctgcccacctagctcaatcctccagtgcctttgccatagctttaagtaggttctcagtctcagagcttaaatcgcgagaactgacgggattagacgcaaaaccaaccaggacagctcccaagtacccacgcgctttcgtctcgggtcaaatgcgcgcctcggaccctagtgcgcgtgcgcgctggtggctccgcccctttggagctacttcctcatgctgcccgctcgcctaccgttcaggctgctgagccttttccttcgtggatccgctcccacggcagcgcgccatggcctccgggagccgctcctggagaggaggtgcgctgccgcctcctccttccagcactcatcgagtctgggacgcgagcttccttatgaccccgtggacacggagggctttggagaaggtggtgacatgcaggagcgttttctgttcccggagtacatcctggatccggagccgcaacccacccgcgaaaagcagctgcaggagctccagcaacagcaggaggaggaggagcgacagaggcagcagcggcgggaggagcggcgacagcaaaacctacgggccaggtcccgggagcacccggtcgtggggcacccggacccggcattgccgcccagcggcgtgaactgctcgggctgcggggcagagctgcactgccaggacgccggagtgcccggctacctgccccgagagaagttcctccgcacggcggaggcagacggcgggctggcacggaccgtgtgccagcgctgctggctgctgtcgcaccaccggcgcgctctacgcctgcaggtgagccgcgagcagtacctggagctggtgagcgccgcgttgcggcggcccggcccctccctggtgctctacatggtggacctgctggacctgcccgacgccctgctgcccgacttgcccgcgctggtgggccccaagcagctgatcgtgctgggaaacaaagtggacctcctgccccaggatgctcctggctaccggcagaggctgcgggagcgactgtgggaggactgtgcccgcgccgggctcctgctggcccctggccaccaagggccacagcgccccgtcaaggacgagccacaggacggggagaatccgaatccgccgaactggtcccgcacagtggtcagggacgtgcggctgatcagcgccaagaccggctatggagtggaagagttgatctctgcccttcagcgctcctggcgctaccgtggggacgtctacttagtgggcgccaccaacgccggcaaatccactctctttaacacgctcctggagtccgattactgcactgccaagggctccgaggccatcgacagagccaccatctccccttggccaggtactacattaaaccttctgaagtttcctatttgcaacccaactccttacagaatgtttaaaaggcatcaaagacttaaaaaagattcaactcaagctgaagaagatcttagtgagcaagaacaaaatcagcttaatgtcctcaaaaagcatggttatgtcgtaggaagagttggaaggacattcttgtattcagaagaacagaaggataacattccctttgagtttgatgctgattcacttgcctttgacatggaaaatgaccctgttatgggtacacacaaatccaccaaacaagtagaattgactgcacaagatgtgaaagatgcccactggttttatgacacccctggacttacaaaagaaaattgtattttaaatcttctaacagaaaaagaagtaaatattgttttgccaacacagtccattgttccaagaacttttgtgcttaaaccaggaatggttctgtttttgggtgctataggccgcatagatttcctgcagggaaatcagtcagcttggtttacagtcgtggcttccaacatcctccctgtgcatatcacctccttggacagggcagacgctctgtatcagaagcatgcaggtcatacgttactccagattccaatgggtggaaaagaacgaatggcgggatttcctcctcttgttgctgaagacattatgttaaaagaaggactgggggcatctgaagcagtggccgacatcaagttttcctctgcaggttgggtttcagtaacacctaattttaaggacagactgcatctccgaggctatacacctgaaggaacagttttgaccgtccggccccctctcttgccatatattgttaacatcaaaggacagcgcatcaagaaaagtgtggcctataaaaccaagaagcctccttcccttatgtacaacgtgaggaagaagaaaggaaagataaatgtatgagaccggccttgttcactccagatattaactgtattgaacacaacaaaatacattgaatttgtattaaacatataacgcat

SEQ ID NO: 1923 - DNA, 4378 bp, Homo sapiens
agcagtgccttagccagggacctgcttggccagcgacagatcctttgctgctctgtctgccggttcttgagatggagtctctcactctgttgcccaggctggagtgttgttgatggcaacagtgggccatctggaccatctggagtggccactgccaagatgctggctgcagccaggaggctctgcccatgctgtgagcttcacagagccagagggagcggggacaagcaggagcccagctccttccaagttggcgggtgggagctccccaggcatagctgcagctgcccaagtcatggctgctggctgagcctccctgtgttcttggagaccaggagcaggcaggagccctgctctcctgggtgcaactgcagccacccaagtccttgctacagaccgtgttcttggaggctgggagcaggcaggagtgccaaagcaggcaggagtgctggagcaggcatgagcccttcctgcatcccccacctcctttgtgcagctgtagccacccaggttgtggctgcggaccaacctggatatctctgcactctaggggcctgggaaggcacccccacctcagcaggcttggaggtatctgcttctgctgcctggcctctccctgctcctggtgactgctctgatctaggagcaaggttggggccgagccagggtgctgttgcagcccagccagttgcgcgcatacttgaggcagtgctgacaggccattcctctgctgcttcagccccctccagactttgggtgctgacaaacatagaagggaggctgagggaaggctgaaggcagttcagcatttgcctgcaggtgcttgtccccacgaacagcctgggcaccatagaaagcagtaggaggcgacatgctctgaggcagaaaggggcgggtccccagaaggcctgaagcctaatggccaggccaccagtccccctgactggagggggaactggtggtgctttttcttggacctgcccatggccaccaatggaccaatcagcatgcacttcttcctctctgaggcccataaaattccctggactcagccagactgggggagaagacctgccagcagagaggagctacctactccagggcctcttttctgctgagagctgcagagacaacaggaggaccaacctgcagagaggagctacccacttcagggcctcctctttgctgacagctgcagcgatgatgggacaagctgcctgcagagaggagctacccactccagggtctcctctgagctattctgttgctcagtaaagctcctccttctcagtaaagctcctcttcactttgctcagcctccacttgtctacatacctcattctatctggatgcaggacaagaacttgagacctgctgaatggtggggctgaaagagctgtaacacaaacagagctgaaacatgccccttgctcaccacattgcaggcaaagaggagagaagagctgtggcccttcaggaagcccagaccaggaagctccctgagccaggattgtgactcccgttggggccctgcatttcctggagtctccaagcttctgggcaccactgtggtgtacttagtccagtcacagccttgcagtgagccagggcccgtactggcacctggagctgcccaccctgctgcagcagccagcgtgcctgactgtgtgcagtggccagaccccacactcttttgctcacacatcccttgctacttcacgcctggctcacccttggcaggggcgagatacaggctggtagcattagccaagcacagcctgccaggctgagtgggcagaacgatcccagtgggcccaagcaaaactcaggcaaaggcaccactggccacagaggtttctgactagaaaagcaacaccccaagtatcctgtgacacagtggcatgatctcatctcattgcaacctccacctcctgggttcaagctattcttgtgcctcagcttctggtgtagctggggctacaggtgcgtgccaccacatctatctaatttttgtattttttttttttttagtagagacggggtctcaccatgttgaccaggctggtctcaaactcctgacttcaggtgatccgcctgcctcagccttccaaagtgctgggatttcaggtgtggcctaccatgcccagcctgttatgcctcttgattgactcctttttcataatgaaatgaccttctttatccctgatatatcagtcagtgttcaaccagagacacaaaacaagtaattgaatatatgtatatgtacatatggatttgttaaagagaattggcttacacaattatgagagctagttaggcactcttataatgctgttgtgtctgatgctaggatttgatgttggcagagtagtcagaaaggaagatggaagtaaagtgggagaagtcgaggtcaggctggaagtcacaagtacaaacttgaacctcatgaaaatggactgaaatccatgttagttcttgttgcctttgaccttggtggtgagggtatccttcagaagctggggctgtttgtcataaacacacatacataggccaggagttggagaagctgaaggaggatctagaggatggtagagtagttgcaggccaagctgctacaaaatgagtcgacaaagtgagtcaccagtcagcaacaacatatgtgaactacaaatggctactatttcctttccacattacacatctcccaaaaattgcctttttggcccgcccaaactgtaaacataaataattctaggaaagctggtgcactttaagcaagatgacacattataaaagcatcatggtctgccccttgtcaacttagtaccatacatgtttctttaagccatactttaattctccaaattatgataacaatgaagttgtgctttcaccttacataacactactatcacataactattaacatgctaaccatttcccaaaagaggaaaatagtctttttgttggtccatgaatggcattcattctgctcccagatgataaccctccttctttcatatcctataacttaaatactgacatataaagttaactattaacacatatcgtgttagatgataagatgagagaaggaagaaacataaattttcaagtagtttccaaaagaagctgggtgtatatcattgcccaccagaatgttcttcttgaattcaactagacttttagaccttcaagactactgcagatcacccttggcatcagattaacttagaaggataggacagaagccacagctgaccagtaggcagcacctacccctcttcggtggtagtggtactcacagtattttacacaagcatgcagggtttttttttttttttggccttcccattccaagttgacagctcagatgcaaggagatgagacttacattgggaacctgtgggatgcatctggattagaaacttccacaggagctaatatgtcttatagcaactccatggacatagcttctagaatttctgtaagagacatgccaattacaagagtcactatactcagggaggcccaaagttatagtatccattagcatagtcaatatttatagttcatttataattcttttggtaatcaggaaacatttttaccataaacaatattgttgggtaacataattgacctattaataagttttcaataaaacagaatgagaaaattaaccaaaggttaattctcatgtacaaaggtaaagtgttttgttaaccttttacccaaaagtgatgatatgaatgtagatttttttgggtgtttgaccaaggaagccaaaccattctttcagattatgttagatttgtagctttgtggagtgttgccagagatgttactttctgtgtgtgagtttgatgagctaacctggagtttgtttgttggactggccaaaacaaatctgagccaactatggtccataccagctgacactgaagaagttcctctcaatgaagtaaatggaattgaagggtttccagagagattagcagtgataatacaggcatgggaagtggtataaaattctcaagaatgaaactgataggccaccaccaatattctacctgaattctatttctcatttcacttgggggaaactaggtcaaactaacatgtgtactaatatatgtctaacttaggcatacgctctagagcagtgattctcaatctttttgagatagtaaatttatttgagaaaaggatgaaaactgcagacttcttcctcagataaatgaacataaagacctacatgtggacttttgcttatcatgtattgtattggaaattaattttctttgatacttagactgtgtaaacaattttcacaaggaagggatttcaatttaaaaatcaatttccagttctgggg

SEQ ID NO: 1924 - DNA, 3833 bp, Homo sapiens
gatgactgcaaagttcctggttcatctccttgttcttgccagtcttcttttatctgctttgcatctgtttcatcctcctccgtttctcctccctccctctttaattgttattttccccatttttcctcttctcttcctcctgtcctctgttcttccctcttgttctctttatccctgtctttccctccccttggtttggttttcatcattggcctctccccaacactcccaccctcccacctcttccggatgttccaccctggctttctgtctccttacccctgaacccaacattctcagctcagaagcctgggcctgctgcctggacccagtgatgagaatccttatctgaggatagggaactgcagcctctgtacaaaacagctgtaagtggttctctacctaggaatggctctgcccaatttcgaggtatctttgcagaatcagagcctaacatgtgctgaatccagagtagttgctagaagaaaacctgatttacttcttcctctcttaaatagcagagtctgagctatgtttgtcctcagacctgaaggaaatagcatcctggatggggcaatgggctccggtcgtctcacggttctcccaggcttcagtttagcagtgtcgagcatgggggttgtccagaggtcaatgccttcatacttgtgctttgttttttgtgttttcctcatcctccctgccccctccccctcatctcccctgctctctcctccttccccaagtacccagtgcccctaggcgtttccgagtccggcagcccaacctggagacaatcaacctggaatgggatcatcctgagcatccaaatgggatcatgattggatacactctcaaatatgtggcctttaacgggaccaaagtaggaaagcagatagtggaaaacttctctcccaatcagaccaagttcacggtgcaaagaacggaccccgtgtcacgctaccgctttaccctcagcgccaggacgcaggtgggctctggggaagccgtcacagaggagtcaccagcacccccgaatgaaggcaaccatacgaaaaaaactgtcccagttaaggcccaggctcagcctatacagctgacagacctctatcccgggatgacatacacgttgcgggtttattcccgggacaacgagggcatcagcagtaccgtcatcacctttatgaccagtacagcttacaccaacaaccaagcggacatcgccacccagggctggttcattgggcttatgtgcgccatcgccctcctggtgctgatcctgctcatcgtctgtttcatcaagaggagtcgcggcggcaagtacccagtacgagaaaagaaggatgttccccttggccctgaagaccccaaggaagaggatggctcatttgactatagtgatgaggacaacaagcccctgcagggcagtcagacatctctggacggcaccatcaagcagcaggagagtgacgacagcctggtggactatggcgagggtggcgagggtcagttcaatgaagacggctccttcatcggccagtacacggtcaaaaaggacaaggaggaaacagagggcaacgaaagctcagaggccacgtcacctgtcaatgctatctactctctggcctaacggagcccacccaggcacagccaccactttgcaagtgggaggaggggagaaggggagacaaaaccactgcagacctaccacgaagccaccaccaccttcagtaacaagggtacgatatgggggtctgccaagctgtgaggaccagtagccaccaagccacccacaagccccctcccaatgaccccccttcagccccgggtgccaccagtgtgggagagctggagccgtggctgagctcagctggagggagcctggccccttgcccggtctcgcagccaccccgagcgttccaccacactgtccgcccttggcctcggcacacgctcaccttttctgttggttacgggacttctcattgtcttaatttcgctttgtgcatcttcccctccagacccaatgtctctgttttcttttccttttgaaaaagagtccctggaaaagaaagaataagtggattctcccccaggagaatcctttttgcaaagataggcaaaaaggattgaatccataccagaacacgtagacaggctgtaatattcaaaccacctctgggccaatgcatttccaaaggatgcctttctcgccatatgcctcccctggcccccagcccctctgcctcggccttgtcagttgctgagctgggcttggctcctttctgggaaatgacagtatttttggcagggagaaggtgcgcaggcctccttgctgctctctggtttggttgggaggtgtgtttacctcttgctcctcattcctcccctgcccttttctctggaatatctaagatgtgagctgcattgactctgaagacgtttgaggaacaggagtgggcactgatagaaaggacttcaacgccagtgactgtgtacctccagcagaagaaaatcaggtgtctggtcttgggggcactgtgctcacctctagagagaagaaaaaggctgggtttggacttcatgcctcctcactggtgaaacccaggatgtagatagagggccacacccaccctgtccagagtagagggcacctgtccacgtggccagggcccatgctgccaccctcgaggagatggaaccctgtgatgcaaaagctttgctggtgtgtttggggcataaggcactgctccccttccatctctagcagatatcatcttctcagccaattctgtaggacactgaggctcttgtttgacatggtgtgtggatggggacttgccccaagactgagcaggtctgccctttcattggggtgtatacatatcaggggaccctgaggtggcaccgtactcagtgttgtgatgcccccacctagggaggactcaatgctctttgtatgccttatgcagcgctgatctgtccctggagttcccaggttcccagctccccccctgcaagccttgaagcctccagcaacgtctatctccaggagagcagggcagcctatgcaagtgttccggcaggaccagaagtggccactcaacacacgtcctcaccagtcaccccaaatggagacactcgcagacctgcagttctcagaccgaaggtgctgccttcatcctccccacctaatgcatttttgaaaccaaaggtacctagcctcagagacagagaaggagagggggagatcttgagtctaagaggaaccctttagctgtttctgcagctgaggtcagtttcaggagggtgaagctgatccccaggaatggatcagctgccatgggcacagcctccgatttgagcctctccggctgccagccagggggcctgggccagaccagggctctgtccttccgtgactttattaaagcaacatttgccacatgtttaagccgcaaaggtattagcaatgcttgcatcattaataatcattcagttgaaggtcaagcccatagacacacactctctgctggtaagaaaccatagcccagaactgagccaataaggttgtttgaacctgagagtgtgtaatggtcatttgggccaagcctcagctagggctgctgcctggacgcctgaggggcagcttatcacagtgcaaggggacagggtaaacagcagggggtggggtgtgagcttggagggcccctcccctggatttcctccaacacctgcttggatactaggcccactgtccctgaagggaatgtcagggaagtgtgcctgtgagctgaattaaaggactggcctttccagaaaacgctttggatctg

SEQ ID NO: 1925 - DNA, 3773 bp, Homo sapiens
aacttttttcggggaaggagacggctgcaagcccgcggtctcttgttgctgtgctaacgaccgttggaaccctctttctggctcttggaacgctcggctctgagaggctccaggtttctccgccagagctcctgtcgctctgtcagttgcgctgtgttcctctctagtcacaagagccttggggaagacagttggaagctcagacatggactcagtggcctttgaggatgtggctgtgaacttcaccccagacgagtgggctttgctggatccttcccaaaagaatctctaccgagaagtgatgcaagaaaccttgaggaacttggcctctatagaggtcttatggaagagagactctttgaaagtgaaggtcatcagcatggagaaattttgacccaggttctggatgacatgctgaagaagaaaactggagtagaatcatgtgaaaggaatgtgtgtgaggtcagcatgggtcatttatcccttaataagcacaccagagctgacactggacacaagccatatgagtatcaggaatatggacagacgccatataaatgtacatactgtaagaaagccttcagctgtctcccctacttttgcagacatgtaattgcacacactggagagaaaccctatgaatgtaaggattctgggaagacatttagtttttccatttattttcatagtcataaaagagctcactctggagggaacccctatgaatgtaaacaatctggaaaaccctttggatgcgcctcagaacttcaaatgcatgcaaggactcagtgtggagaaaccttacaaatgtaagaaatgtgaaaaagcatttaataacttatcttcctttcaaatacatgaaagaatgcacagaggagggaagtatcatgcctgtaagggttctgggaatacataccgtttttctggtttctatcatagacataaaatgcctcatgctggcgggaagttttatggatgtaagaaatgtgggaaagcctttattagtttctgtgcctttcgataccatcaaaggactcacactaaagagaaaccctatgcgtgtaaacaatgtgggaaagcctatatttcttacacttcttttcaatatcatcagttgaatcacactggagcgaaatgctatgagtgtaagcagtgtggcaaaggcttcgatttgcccaattccattcgatatcatgaaatgactcacactggggagaaaccccatgaatgtaagcaatgtgggaaaactttcagatgtgcctcaagcctccgaatacatggaaggactcacactggggagaaaccctatgaatgtaaacagtgtggtaaagtctctcgttattggagcggccttcaggtacatgaagtaactcatattggaaaaaagctttatgaatgtaaggaatgtgggaaatcatactatagttctggttcctttctaaatcataaaaggatccacaccagggagaagtcttatgaatgcaaggaatgtgggaaagcatttggtaatcccatatcctttcaaaaacatgaagggagtcacagaaaatggaagccttatgaatgtaaggaatgtgggaaggtattcagtttttccagttcccttcggagacatgaaaggacacacactgaaaaactctgtgaatgtaaacagcatgggaaaggattttttcatagaagctgtcctagacacatgaagatagacactggagagatacttcataaacgtaagatacgtggaaaagtctttcattctcctagttcatttcaaacatgtgaaagatctcacactagagaaaaacgctataaatgcaagcaatgtggaaaacccttcatttatttcaatgcctttcaacgtcatcaaaggagccacactggagagaacccctatgagtgtaagcaatgtgggaaagcctgtatttcttccactgcttttcagtgtcgtgaattgagtcacactggagcaaaacgctataagtgtaagcagtgtggcaaaggcttcaatttgcccagttccattcgatatcatgaaatgactcacactggagagaaaccctatgaatgtaagcaatgtgggagagctttcagatctgcctcacacctacgaacacatgaaaggactcacattggggagaaaccctatgaatgtaaacagtgtggtaaagtctatcgttactggagtggccttcgaatacatggactaactcatattggaaaaaagccttatgaatttaatgaccgtgggaaatcattctatagttccaatttctttctaaatcataaaagggtccacactagagtgaagacatatgaatgcaaggaatgtgggaaagcatttgataatcctacatcctttcaaaaacatgaagggagtcacagaaaagggaagtcttatgaatgtaaggaatgtgggaaggtattcagtttttcccgttcctttcgtagatatgaaagggcacacactggcgaaaagccctgtgaataaacaatgtgggaaaggatttttcatatcttctgtggagctttgaatgcatgaaaagacagactacagagaaatgctaaatgtaaggcgtgtataaaagcatttagtaatttctcttccttgcttatacatggaaggatgcacactggagagaagccatatgaatgtaagaattgtgggaaagccttcacatctgccaagagccttcaaaatcatggaaggacacacaccggagagaaaccatgtgaatgcaagcaatgtggcaaagctttcatttgttccagttcctgtcagagacatgaagagacacattctgttaatatgcattcagttatcctaattcctttgaaacacagaaaaagagtagggaaaggacctctgagataactgttttctgagttgagaagagctacttgtgaatggacaattaaatctagatgtatttagatctgatacaattcatctgtagccaacctttttttaaatttttttattttttagatggagtcttgctctgtcgcccagactggagtgcagtggcacgatctggctcactgcaacctccgcctcctgggtttaagcaattctcctgcctcagcctcccaagtagctgggattacaggtaaccgccatcacgcctggctaattttagagatggagtttcaccatgttggccaggctggtctcaaactcctgacctcaagtgatccacccacctcggcctcccaaagtgctgggattacaggcgtgagccactgcgccctgccacctatagccaatcttaatgagatttcataggcacagacaaggaaggttatcagtcacatattagaggcaccacacagggagagcagtgtgtggccacatgcttcagcccattttttctgattctcttgcttgcaaattaagagtattctccaaatcacttgactttccttttctcagagttatagttctccagagatgtcaccagatgattcacattaaaggtacatttccagttgacttttttatttcagatattagtaaatgattaccagagaactaattcaaactgtcatggttggaaatactctgatgctcaactccctaatctatagagtgagttaaggtctatactcttttgcaagcattgttctagtggcagtgaccctgttcatgattcagcctgacatttactatgctgccctgaaaaccaactagatgggagcttgtttctctctgcattgtgtagtgagtggtgtcacccaggactttcatgtgagaaaaagcaccttgcttttaatctggg

SEQ ID NO: 1926 - DNA, 3781 bp, Homo sapiens
aatgcttctgagaagagagaggaagatgacttcagaggctgcttgtggtctctcactcaaggctggtagggagccccggtctgcgtcctggaggaacggcacgctgagtcctgggccagtggccggcggggctgttggcgaccacagtagcacacaagggctctttctgaggagcaggagaccctggcacgggccccacgggagtgtctggggcgtccccgcctgtggcctcttctccccgccgcagcaccagtggctccacgagcagggctcggagctggccctctcctgcttcggagccgcgctgactgggtgtgtggcggatgggaggccgccctgagtgctcctcctcccttttgtacagcctgggtggaaaggacgggcctggtgcacttcctgcgggagggaggacatggggcctgcttccctctggcgctcctccacccgggcagcgtggtttctttccaaatgatttatcctctcatcgtcctgccgctctgtgcttcatggcattggggtcttatccggaaggggattgtccttttttggggggagtcggtgaagtacttcctggacaacttggaccggatcggccagctgaattactttcctagtaagcaagatatcctgctggctaggaaagccaccaagggaattgtggagcatgacttcgttattaagaagatcccctttaagatggcggatgtgggcggccagcggtcccagcgccagaagtggttccagtgcttcgacgggatcacgtccatcctgttcatggtctcctccagcgagtacgaccaggtcctcatggaggacaggcgcaccaaccggctggtggagtccatgaacatcttcgagaccatcgtcaacaacaagctcttcttcaacgtctccatcattctcttcctcaacaagatggacctcctggtggagaaggtgaagaccgtgagcatcaagaagcacttcccggacttcaggggcgacccgcacaggctggaggacgtccagcgctacctggtccagtgcttcgacaggaagagacggaaccgcagcaagccactcttccaccacttcaccaccgccatcgacaccgagaacgtccgcttcgtgttccatgctgtgaaagacaccatcctgcaggagaacctgaaggacatcatgctgcagtgagcgaggaagccccggggtttgtcgtcgttgagcagcccccacggctgtcggtcagactcttgggtgtgtgttgtctgtgtggtccttgagtgggtttctcggatccgtgccctggaatacctggctcaggaatgctgtcagaccagccagccagcgagctctaggcaaaaggacatggaaactgtcacgttagctactgaatcctgggggcgagtgaaactactgaaaatccgagtgatgatgttgtgaatacggaacacctaatcacacagcttgctttgcttttacagaaacgttcctctttttctgacgcagtttgaggaccgtgttgtgtgtgtatgtgtgtacacacgctctgtctttaatgacagaaacacaaaaaccagctggccttgcagacggcttttctaactcacaagtcttccctgagacagactaacctgaaagctttgcctaacagtagcttgtagagatccagtgcacgccgatgctgctaaactcagtgcctgagcccggccctgcagccccagccgcagtgtctgaaggccacctcccaaagggagcacgttgccttttcaaactcccgtgccgatttcctaagagcccctagtccaagcctctcagatgaagctgaggagccgtgcctaggatcccttcccagctctgaggacgggctgcagagctctgcaggtgtggattcaccttacgcccctacagcaggctcagcccttcccaccctgccccatgcccagcagcacaacacggagtgagacaggatgcccacggtgactgccgctccgtccgtgcacacacagcggtgctcttctccccttagccacccactgcccaacccaacggcaaagacacagaaaccaggtccccttgcagacggctctcccatcttcctgcaagtcatctgctcacacacagttggcagcacatagcgtttccttctttcagaaacattcctcttctggggcttcagaaagctggcaaggccactagcagagcttttgttaatgccccagctgcttggcgagctaacagctgacctttcgggaagcccacagacgctggaggaatcttgagtttctccaaactgccgctccaccagtgcctttggacagccgtgcctgttcgccgctctccctaagtctgattctcatcgaggcccctcgcttctatgactgtgcttgcagaagagtaaacactctcggatgccgctgtcctgggggagcccgcgggagcctgtgaatgttgatacgagctggccagtcctgggcccagctcacttgtccagctacctgccaggtggctttcactgtgtttaaaatacattgcattccaagctggtcccctctgtgtatcactctactgagaaatcctgcctagtgtgttttgggatgtgtcctagcatttacaagaaaatgaaaagcgtcctcttaattggcacccgaatgttgctgtggctcagtcacatatcccagggccctcgtcccgaggccgtgctgccccgagccccgagcccctctgcagctcacccttggcttgttttccgcaaacccggtaaacgcaagcccttggggcagatgcagaagcagaagagggaggggaaacctgcctctgggtcaccctgttagcacagcgttctcatcgggagacagcatggaactctctctcgcagtgctcgaggctgtgtgtcagtgtttgctgggcttgtggctccttttttggctggataaagaagtcgctgtttttgtactgcttctgtggctcttcacagacctcacggatgtgaccggagatgagtgccgatgaccacgttttaaaggagaaagagagctcctggtggggccctcggggtggtctcaggtcacatttgcagtctgcaacagtgacgcgcagcccggtccagagcgtggtgagctttgtttgccttctgggtcggctttcgctgtgtctcctgtgtgtgttagaatccagagcccagaggaagtgcaagcgggtcctccgccaacggggagagcctcttcgcggcgctgttggcgacagcagcgctgtgattcgcgtagcaggggagttgtttgaaacaccttcctgagtagtccggccttgtcaatgagtgcttgttttcctttaaacagtctgacatatttactcgtcactttcaaaccagaagcatgaaaggaaggagatattgtggggtccgtttaactcgatagaaagcgcagggggatggcccccggcgcaggctcttgacccgctcagcgctgaccccaccgccctggccgaggcacttggccttgctgagctggacttcctcctcctcctcctcatgaccggggtgaattagaacgtttttaaagacacccccttccaaattctgtaacacattgtaattggagaagaaggaaactctgcaaggctaaactgtcattcacaacttggctacacatagactctagtcagttttgtctccagaaccttaggcttttgtattttttaattttaatttcactgttaatccttattgtcttttttattaagatgttggaaaagcaggaggtagttgtgcctcaattattgcaaaaatgtaacaataaagttcctc

SEQ ID NO: 1927 - DNA, 3812 bp, Homo sapiens
cattttttgtgttacttagttctgtagtttacagcccaggcccctagaaaagcctaggaagaaagatggcctcctccactctgaggattcagtctactacaagtaccccttctggctgggcacagtgtctgtgtaacagagggcactgtctctttttcttttttagcagatccaaccagctatgccacaggggatatttgctgagctatggccgaggagtctccaacaagaaccatgagggagaacaactttcagctttacttggcattgctcttacatcctggaaggacctaagatgcttttgcagggtgctaggacttggcaccctccatcatatcaaggctgtggagcacggtactggggtcgttaaaaggcaccacggaggacatgttttattgctcttggttttccaatcccatgtttgaaaagctgtctggtgcactgttaaaccttcatatgggtcagagggctgtggcagcagccactaccagctccttccctgctgacctgaaaattttttctctggactggattccaaaccttttcctgtctgtgatcacatttttgtcctcatttttgtcagtgtattcactatagtgccctttgtatccatacacagacggtctccatgccctcaagcttgcaaaaccctggttagatcatattgtccatacccttttggaattcaaagtttacattctaattttatattgtttttcactctcactcccagactgatgtcttgatggagaaggtggaccagagattcaagcatgctttctagaaccctagcagggttactgaattatctccattacaagttcagttacagattcaggccttctgctatagacattctgttagactatgatctaagaagggtcaacttgtgcctgaggggaagatacctccagatagttttatgtcctgacttggaaagcgtttaccagccaccttatagctatactctgtctccaaagtatcagggaccatacacccctagaaactttaaaagaaagcgcaaagctacactcttaatgttacagtgattgagccctaatgtttttccactgtcctagattgtaaaattcctgttcttgagaaaagatgtcttcctaccttccctttgtagatacttgtttcagtgtgtggccccatggtccctgtcattcccaaggtgttctttctaccatgaaatcaagcaccatagcactgaaacacttaaattatgtttgcttattcaatactgtgagtttggtagaagcaagggctttctcttcctcaccgttttgtttttgagtttcaaaaccatgcctgtcactctctgggcactcagatatttgctgaatacataattatagaaatgcaagtaggaattgcgctgtttgcttttccttgccttctcctttagcactctaagtagacctgaaccattctccagcctctcctcacccgccttcttcccaagttccttctaaacaacatggtagttttgtccagactgactaacatgatccttattcacctgctgattacaaaagattggagataaaataatcattactgtatctcctcattttactgaaggcccagagaggtaaattgcccaagattatacagcatatccactccataacattccatttcccctgcttcacccactaggctggctacctactcattttatttctgatcatcaccctattccctttccacaggttctttcatatcagccttccagactttgggaagaggctaccgtctggactttagcccatactaagcttgtagaattttctgtcacatctcttgtgtggaattaggctttttcttggtgctaagcaacttcagggatttgtgacctatggctatactgagatatactttattaaatgcctatgattgctacatcattctggttctttggtagatttacatctttgattgaatgtagccaggaaaccttatctagaaacctctttcaagtcttggccacacccagggcaagcatctggagccaatgctaatagtatttctcagttctttctggagagtaaccatgtgttcaatccatccgtacttctaccaccaccacattctctgatgatgtaactatatccagtacaggcagttgtttctcccaagttatcacttctcattcttaagtaaaaataatttcccaggccagaaggatctttcaggcataagcatctagtcctccactgcctgaaacttttgccctaggcttttgtttccttcccatattgaaggtactgatttggccttgtctgtttcaagaacagtgactagtgcatgattgaactaacccagccagtctttgatggttgctgtagcacagaagattaggtaatttggaaaacacactactatgacccccaaggtaatagtaataaggtcccaactagtttaatggaatgcgaaaggaatgaatataaggtatagtgctaagtaaattgttttggttttgtgtggtaagggaggaagagttggggtcaaaattagcacaaatgtagggcctgggtggctgggagaatgttaaaataccgttagcaaaaacagaaagacacagagaacaagcaggtttagccaaggctagggggtgggaggacaaattcagtatgaggcgtaatagatgggaagttccactgaacatccatgtcatatttattaggcaatcaggagtatggagctagaggtcaggaaagaactctaggacagaactttagaaaatttccaatactgagttggtttttaagtcacagtattgttatatataagagatggagatggacagagcctttattgtatatatgcccatttaaagatggaaagtggggagaggactagcttcaagaggttaaagtttggacacttaaacgtcttttaaacaggattgaaaatgagaggtaggacagagtaaagatgtgagaacattatggaaaggtagtttttggatcaaggtagataggctttgagcttgaagtacccaaccttgacaagagtaaagaaaacagcaaaagcatggagacctttcgtcagaagtgggaagttgcaatgtgtgtccccaaaatcaaggtccctacgaagatgaggtgggcacagagtggctgcgagcatgagggaggcagaagaatttgaagtaagaggtagctaccataaggaacatgggcatctccagggggttacaaggctggtcaccagcagtgagggtgccgctgaggtgggatagcttacacggaaagaacagtcatgtttggtggtttttctagagcaacatcagcagttggtatctggaggaggagtaatgaatggtgggaggacagtgaaaaagggaaactgtcttctaagtggagtgtctgagcaggacatccatgccagggggaaaagatatgagggagtcacaaagagtaggtagactgagaaagggaggaatttagaggctagaggtgacaatgaggacagagagtgattgtgcatatcagtaagaatggaattaggtttggtctagggcgaggagtagatcaatatgtaaatgttttggaaactaaaacaccagataaaaattaccattcctaatctacagctaaaatgtggttccctgttcttaatagatgatattttccctgatcattgttaatttcaacaatattttcttctcttcttgtttggctgaaacatcctgaggttttccactctctcatgttctaaggtcagacttctgaatcctctcattttagtctaggtcagtgatcttcaaccttggctgtgtactggactcacctgaggagatt

SEQ ID NO: 1928 - DNA, 5249 bp, Homo sapiens
aactgttgtgctctgcgggtggcgatatggaagcacgaggctgtctctgacaaccacgtcacgcaggccgctgtccctcctacccggatgggctctgtgctgggccgggaattctgcccccagggctgatgtgaggacgaagttcttcacttatctgttatgagttttcaccgtcaactacccctgctcttcttttggggtgagagatgggacttgtcttggaaagaaggctttgctttgcccttgggaaggtggagagttgcgaaaaagaatgtgaatggctgggcttaatggtgcgagttggttttgtgtgctctagggttagaagtctgtttttcccatgggagaagggttttgtctttctggtccaagaactcgaggaccttgctagaagagcgttccagccacattctcttttcacctgcttctggagtttggggttgagcagcctggagtgcacagaaccttggcatccctggttcggggttccgcaaatgggccaagcccactctcagagctgtgcgggtgaatccagcagtgcctgtaccctgcctgctctggaaatgaggcccctggagaaaggaggcctggactctggagaggggacaccagtcctggggcctggccaatagacaaggacacagggatctttgataaacagggtttggctttctcctcagagttgtgatttcttgcctggttcccaggagcccctgggaagctggacctggaacactggagcctgatattctctgttgtggggaatccaaggtgaagtgtggccacgccttgggctgttctggagagctacagcgggagagaagttcatggagttctgtgacacagtgactggccaggaagcccagagcaagaggcgacaagacacagccagatcagggagaaggcctgccagcaatccagacatccacgccgtgagctttctgcaagccctcaggcagggctccggaaggccacctctgggatggtggggtcctacaggtgggcagagctgggtttactttagcaagatcatatgttcagaggtaaagcccatgggggtgaagacttggcaggtgcattccaccaatctggccatgggaggaaggacacctgtgctttttctgagtggccacgtgtttttgtggctctaggagtcagggttacagccagattaagaaaaaacagaaccccaaatgctgtgaatttcaggcttctttggccattcgggtaaaaaataacctgtgccaagtggatcaagcttgatgtgggtgcgagggaagcagcatggtgctgtcatttcaatcagggcacaaacactggagagaaaataaatactttagaaggcacttgaccttttaatgtggagttctaaaaatggagattgaacacagtgatgcttaacagaggcaaagagagccaggctgctatcagattctttctacccaagagtctggctttcctccctggcattagcagggcatccctgttacccaggtgagcacaagaacagctgttacctggatgaacctaagaacagccctattacctgggtgagcaccagaacagcctgttacttggatgaacctgaggttagttctgttaccaagcaggcttgtgtaagaagcatgaccgcctaagaccaccacactgtgggaaggccaaggcccgtgtaatgaggtaccatgttcagaggaagaccaaggagcaccaaggaggcagcagactgagtggagaggaatatgcaggggatgctgtgtagtcagaatcaagcttcccagtgtcactcaaagaagcagcaagactctgtcttaacgtggcttgctgttgctattatttccctcgaagccatgagacactggatgagagcagcggctgggcgtgtgagttaacatcgcatgctttcctgactccactgccccactcatgaggtcatagcatagcttcttgaatttgtccttctctgaatggaagccacttggatcctccaggtatttctccaaggggcagggctttcagcacagaatcaacaggagaaaccatctggaaagcccagaggcgtgttcggcagcgtgtgggagcagagctgcagtaaacggtggctccttgttcgcccatctcagctgttcagctgacttcttgccgtctccagctgtcttctctatctcatcctgatgactccttcccacaactctttccctggctgccgcaacggtccagctgcagcctgcattcacagttacttacctgtggggctttcttgtttctgagatggccgaattgtcttctgaaatttacctccatgactctggttatatattttggttcctagtgggtgccgacatcacagtgggctgattagatggtttgcattacttgttggcaggccttcgagcctcctgtgcagtttcccgaaaatattccatctgcaggtgggaagcccaagcccctgggcaaattatgccatgagtgtgtcttggcagtcattctgggttccaatgacttgggccgtggttcaaacattccctggggattgtccggatctgagctcctggtggtgggaagccagcctttggtgccagcctggcccagcaccatctcttgactcctgaccccaccagagggtgaggacttggtgtgagcagggacacagcaggtcccaggaaagtctgctgagtgaacgggtgaataaaatagtctcaaaccctgtatgttattccctccttgcccctactcagaactcctcctcacttccaatcggaacttgtctcctctctgccagaaggtcagccctggtgattcctggagttcatgcctcctgtcccgccatggttctgtggactgctggctgttgtggggagctatcttcctggtgagctttgcagggcagggtcccagcaggagagcagaagcaagatgcatggtgcagatgagggattctttccagtggttagaccctgcaggaccatgggggagctgggcagaaaagtacaaggggtgttggagaatctgagaaaaggcatcaaccagccttcctgaatccctggcctgtggcaagaaaggcaagtcagagcatgggccatggggcacaaaggggagtaggtggggtctatggactgccaccacctctagcataaagtccaggctcaatgtctgctgctgggcctggggcctcttgtggtcagtgggaagggtcaggcccagaggagggagggcagctctgtgtttgcttgtcactgtagaggccatgacaaccttcagggtacaagctgctgcctcacttccattttgcaaatctcaggcagaacccctcttttggccaactctctacatggaagagggttctggaaagataatcccagttacatcatgtgtgacccaggttcatcatgtaatactaactgccgtggctggatctcagatttctttgtgtgccattgagtgttttacccagggcagatacaaatgagtgatggggaggaaacaggctaagggggcaaatgcaatgcttttgttgacccagccttcattatgggttcactactgatcaccataccagcaaatgctgcctcctgccccaaggccgtgataaggagcacttgaaagcagtctgtccatttccaaaatattgtcacttcaagaatgatgtgtaaatggcatcatacagtgtggaaccttttgggattggcttttttcactcagcataattctctggagattcatccaagttttatgtatcaacagtccattccgtctaatggctgagtggtgttccacagtctgggtgtgcacacagtgtttaaccattcacctgtgagctgaaggacatctgggttgacgattacacatttttgactactacaaataaagctgccatgaacattcatggtgcaagtttttgtgtgaatgtaagttttcatttctccgggataaatgctcaagaacacaactgtacgggcgttgcatatttagttttatgagaaatgactaaactgtttttcggagtggctgtaccagtttacagctcaccaatactttattattcctaaaataaaatattactaagttaattgtcggggagggcagtggtggatgtggccatgaaaggacagcaggagggatcctttgggtgatgaaaatgttcagtatgtttggtatcttgactgtgggggtgaatacaccaatgtatatgtgagaagatcgtatagaactaaacacacacacacacacgaacacacacacacaaacacatacacacagatgagtccttgtgcatatataactgggcaatctgaacatgacacatgggttgcatcaatgtcaatacctggcggtgaaatcgtattctagttttgccaagatgttaccactgggaaaactgggtaaaagtaactgcatgtgaatctacaattatctaacaatttaaaaaattaattaacaagtgtctaaaatacatgatatttgttaaaaggcaagcctatgaaaaacatgatacattattaagagttaggcaaatgttgttgttacttgcttttctgcttttgggggccaagtactggttactaagattcctagcctcttccgaaggcggtccttcctccacacaactgcaagaagaggccttttcagtgtagacccttactttacccctccaccccagggcccattttagggaatagaaaagcaatttggaaggattagactgagggacccgtgcctccagcagataggccagcggaagagcagtcagtgctgtgggagatgctgcggggaggagcgtgtctgcgaggaaggactgctggcttcagcacttcccgattggaacttcatgatggaatccttggcacaccaatgctaaaaaccaagtgtgaaaaaaatcaccctagaacctgctagagtgatactgtggaggatctgtgggctgcaccgcccacagggactgccctgtatcagcatggagaactgttatcccatggcagggccactgggtagcggctgctgctaagtgggggtgccggatgcgttccttggttcatcttccactgatgttttggaaattgggctccgtaagagcacccagaagtgcttattaagaaccacccgtgctctgctggttcctgaggtgccagattccctccagggaaatgttgacctttgtgatagactatcttatgaccaaaagcttcgcagcattaaaatgtgatccatctcattaggttgtcatatgaagcctataaataactccagaaatg

SEQ ID NO: 1929 - DNA, 4145 bp, Homo sapiens
atgcccaagcggagctgccccttcgcggacgtggccccgctacagctcaaggtccgcgtgagccagagggagttgagccgcggcgtgtgcgccgagcgctactcgcaggaggtcttcgagaagaccaagcgactcctgttcctcggggcccaggcctacctggaccacgtgtgggatgaaggctgtgccgtcgttcacctgccagagtccccaaagcctggccctacaggggccccgagggctgcacgtgggcagatgctgattggaccagacggccgcctgatcaggagccttgggcaggcctccgaagctggtgagtggcaccagcagccctttgtggctgtggcactgagggcaggtggtggcacgagcatttttcttgatttgcaaggtcaggcttttcctccctgggtaagcaggactctgacccagagcttggccttctggctcagaaggctcctgttatcaggaggtctcacattcaagactggaagttgttaaacagcttctaagtactgggccaaaaaagcagcagagactccccgggtatcccgtctgctttccgcctgcagccccctcagatagtcccacaaggctggaaacatgccagtcccatccctatgcagtgtggggtctcagagcatcacctgtgttgctggttagaaatgcaatccccgactctacctcaagtctggttggtgtgtctaggaggagcccaggcacctctttgttaaccagtaaggcagtgggccacactgagacccagatgggacacatggagttctgacaagcaacaggggaagaatggtccttccagcactagcctccaggtagcagagggacctggtaagggaaagagcactgaacttggagtcaactacaggcatatctcaccttggatctctgtagtaaaacgggggtcctgtgcactgtaccaggctcacgggttgtcagaaggatccagtgtaggtggggatggggtaggcaggtcagagccctctgccctcaggtatgcatggaggcaggtagcccggcagtcccggaaactccagtctccttgcagcctgacggcttggcgtttcttcctcacagacccatctggggtagcgtccattgcctgttcctcatgcgtgcgagccgtggatgggaaggcggtctgcggtcagtgtgagcgagccctgtgcgggcagtgtgtgcgcacctgctggggctgcggctccgtggcctgtaccctgtgtggcctcgtggagtaagtacttcagtccctggagctgctgagatcccatagccccagcaagccgtgatgggggacgggtgggtcacccatgtgggcccagaacacacacatgtgtggcccctgatgcagtgccatctggcattgcctaacgggacatggtggcaatagatgcttggcccaactttagtggttagtaatcctctctaagggaaagctgaacctcacagatgacctgctctgtatccggctctagtccctgtcttcagccacttcctgttctgatctttgagcacccccacctcctcctcctctggtctttgagccccccctccccccgtccgaggagcccctggttggtgacacaggtgcacactgcagcttcaccacagtcatgcgtgccgtttggttgtacaccctctcaggcaggaagtggagtgtttgcgtagtctcccatttgtgggtgggtttgctgcagctggctggatcccgtccttactcctaaggtggggaggggcgttctcaccctaggggctactcacctggtggatgggagtggacagtgtggagcctgtttgccctgccccgtgagaaagatgacttcatccagacacatgtggaactggctccatagacccaaagcaagcttagtccaaacaatgtctgaaattgtccatctaaaatagaaaccacatgttacatctcgagtcctttctctcgagcctttcttcagtcggggcagaggcccagactcattggagacggagagccccgggcagggggggcagcaccagggagaagcgccgcgtgccagtgatcggctcccatggcttcagcatgggcaggagtggggtaacgcaccccatccaggttgggaatcatctgcagggctagctatgaatgtgggatactctgtctttgcttttcacccgctgagttcatcttctttcctagaagtaaactgaaaagggcagggttttctcattgtctggtggccctctcaccaaagcagaagtgaacatagccatgggcaggttcagcggagaggtgggtcccagagcgctgcgtggctggcctcccactcctgccctgcacaccatccttgagggactcccttgcgcccatttcctcctggcctctacctactttctgctgctgcttcctcccatacccacagagttcacgttgagctgagtgggccactgtccccactgtggacacactcttttatcgcagctacagcacaggaggtgggctctgccctctttcacaaataaatgacttgttcaaggtcacaagccagaagtggcattcccaggccaggcagcccagctggtggcacccgcagtctcctaccccctcccctgccatttcctacctcaggaccaggcgtcgcaggagtgggggaaaacagggatctgtccacacggctctggtttaacacagatgcagcccagcagcctttggcgtcctgctgatggcctgcactggcccacgcctggcccgtcctctgcagggctctccagctggctgccggtggcggtgaggggctgtcttcgcggctcacccacaatactactggcaaactctgcaaaccaagtggcaagcagttctggctgccttgttgactccacggccctgtcgtgtttggggtagccattgccagtcccgtttcctcgcaacatctctcttaatcactttctccctgtgttttgccgggttccctagcctttacctttagagctttctttttttttttttttttgagacggagtctcgctctgtcacccaggctggagtgcagtggtgcgatcttggctcactgcaacttccacctcctgtgttcaagcaattttcctgtctcagcctcccaagtagctggagttacaggcgtgcgctagcacgcccagctaatttttgtattcttagtaaagacagagtttcaccatgttggccaggctggtctcgaactcctgacctcaggtgatcctccggcctcagcctcccaaagtgctgaggtaagccacaccatacgcgtgagccaccatgctcggccctacccttagtcttgatatatcagaaaagcactgtttgatgtgcttcagtgtaaaccattgtggttcggtgaattctggcaggtcatctggaggtttctttggagagcttctatcctactggaaacccaggttgggccccatgtggattgatcggcagtgggaatcagctagggctgctgtaactgagttcgcagacccagtggcatagacagcaaagaggtactgccacgtggctttggagaccagaagtctgagaggaaggtgctggcagggctggttccttctgaggctgcaatggaaaacctgtcctggcctctctcctggcatctgctggttatctttggtgttccctgtagacagctgccccctccctgtatcttcatgtcgtcttccttctctgtgtccttctcttcacgtagtctttttaggacgctggtcgtgttgccttagggcccccatgtcagtgccgtcatctagactgattatgcccgcagtgatcctgtctccagataaggtcatgtcctgaggtgttctgggttaggactttgacgtttgaatggtggggggtggtggacacaattcagcccctgacagcagcttttctctcccctccctgacgctgtcgcagctgcagtgacatgtacgagaaagtgctgtgcaccagctgtgccatgttcgagacctgaggctggctcaagccggctgccttcaccgggagccacgccgtgcatggcagccttccctggacgagcgctcggtgttcacactgaactgtggggtcgacgggaggggtgccttttacatgttctattttgtatcctaatgacagaatgaataaacctctttatatttgc

SEQ ID NO: 1930 - DNA, 3839 bp, Homo sapiens
actcaagagatggtcccaagctaagccccagggaactggcaataaataaggtagacatagcacctgccctcaaggaacttcgagtcccgtggactcaggatgctccccccacacttcaccgatttgaagggagacctatttttgctagattttccttcaaagaaggaaggcaagatctagcagtcttgcccactcgcaatcttgcatcacttgcccaaggtcactcagcatcagatctagatgacagatagggaagtgccttgagtctagagttatggccaggaataggagcgttctctgtccttggggatgacatccactcactaataagcccagagatagacactaggatcccaggatgaataagagtcctaaaatgaaggattccacagccaaatgcactgggaaaagctacaccatctccacccctccctgcaagtctgctgctcctgaacacactgtaggctctctgaaaatttctacagaaagaaaccacttaactcgatgtttctcaaatgtacttgaccatgtgaacctttttttccagccacacctactgaatttggagtatgataggcagaggaaggaacacaggctctggatgggatcaaactgtcaagatattaaaacacagaggagggaaggtcacttgcccaggtcactcagcatcagatctagagcctgggtctccatgctgttgctaacatgagaagatccttaaggatattctgcctggcctcctctctcagagaggtggccctgacaacctgctatgtggtagttcattctggagctgctgattccttcctagcctttgtgcaaattaaaagaaggtaccaccttcttctgggccaacaaaatcccatgtcagagcacatggattgcaaaagtgtagtatgggctggatttcagcccccacttgcccccttagccaagcaccctggtgcaggccacaacctgtgcaactgtacatggccacgcttattagccctttcctcattcctcctcactcattctacccttggccacttcacgtgaggggcgccctcccctcagtgctgggctgaggctggtgtgggaacagcccagttgttggggctgtacttccaaaccccaaagcagcatcagccaaaggtgctgactcagcaaaccttaatttatctcacaggccaggggtgcgcgtgaagcaattagtgaaataatggttatgtcgcactaaaaattatttatagagtcaccgtgcacacagctgtgattaaattagacaaccagggggactttaactgctggcggaaccagcatcccaggcccgggctgcagctggctgggggtggggcagggtcatgcttctggtctgctcacccactccaggcagctgagccaaccctgacccaggccaggacatagggggtctacctgggcaggggtcttgggaggaatccctgtcccagagagtctgcgctgccaggagccctgaaaataaacaagtagggggctttcacacattcaaggctgagcggcaggaagtttgttcacgtggagccttccgcagcccttcacgagtgaaagagacgtggactgagaaccagaaaaggtggtcccggagctccgcgggcttggtgttgactccaacagtggcccccgagagcccagatcccagctggaaaccatagatcggtgaagccctctcattttacagttggtgaaacaaaaggccagggatttcctctctcttgttcctccagcagacatcaggagacctttgatccagctgggatcctggatgaaccctttcccctctctggacctcagtgtatccccctgaaaagtaaagtgttgcacaggcaacagatattgatcaagcacctattgccaactggatactgttctgtgtttatatttattgccttattcaagtttgcttatattcttctttagctcctcacaacattcctataaagtacgtattattgttgccactttgcagatggagaatctgaggttcagagaggtgaagatatttgcccacagtcacacagcaagtgaggcagagccgtttttctaaaggcccatcagactgtaatgatagaacattgtggtacactgggctgagatgctgcaaaacgaaaacagaacttcctttgcaccggcttctgggcaggacacttgagatgcctcatttcatttcattagcagcccctcaggggtagatgtggaagctgagtcacggagtggttcaagccccctgtgattggcagggcttatttttatcagcaagacctgagctaaggagctccaaaggggttgcaaatggagctgcccacaggggcccagcaagtaccaaaaacagacctggatggtggctgtggccatctggactcccttgcaagctctgccttcaaatccatctgttaccatgatgcagccccaagtccaggccacccacgtctagagcacaaacctttgcccaaagaccagagctacctgtgtgatttcaggattctccctgggagctgatggtaccagctgctccgagaagtggcagccgggcggagagtgtggatggcagtcaggaagccctcagggcactggcttctggcctggctcatctgccaaacctgggccctgcaagcctggcactcccatctaagctaaagatagtttcagaccatttcacaagagtcgcaagcccaatcacctttttacagccagggcatcttcttgcacctccctggccctgcctctaaacaagcccctagaggctcagaggagtggagtgactgggcagggcctcgaggctcaaggctcccccagccccctcccctcccctcttccagcaccttccccgatgcctccctcatgctctgctgtgaacaggcgggtccctctctccaatcacaattctgctggcaaaggggatgaagcttgctctccagatgcctcctgcccagtggcatctgatccaggaccctacaggaggagggctagagggggagaggccagaggattgggaggagctggctgaccctggcgccctatctcccagcaggtatttcccggggagtaacctcttaccccacaagacgcatcctccccctccttattcccctgcccctgcccaacatggctcctcattcaaaccagggctggcctctaggtgctcccaggtatgcgtggggcctgggtcggccctgagtcccgctgctgcctctggccacttagcatgcagtccttgtttgcgactgcagcaaccaaatgagattagcttgcctgctccagcgggtccccacttgccaccacccacggccctgcacagccaccagctgttctgggagcctcccacagccccagcctgccatctcacccccatcacagttgggccagtgaggggaaggtagggagagggtaaacaatcctgcccggctttgtagcccccagatccaccaccgctccccaccaggccttctggagtcagcagttgggggtagggatgcagagggagacaaacaggattcgggatccatccttgcttgtattcctggtcagttctcctcatgcctgtaatcccagcgctctgggaggcgcaggcaggaggatcacttgaagccaagactttgatcttgaggccaggagtttgagatcggcctgcacagcacggtgggacctcgtctctacaaagtttaaaaattagccaggcgaggtggcgcgtgcctgtggttccagctacttgggaggctgaggctgggggattgcttgagcctgggaggtcaaggctgcagtgagctgtgatcacaccactgcactccagctagggcgacagagcgacaccttgtctcaat

SEQ ID NO: 1931 - DNA, 4471 bp, Homo sapiens
ataaatagagcatagaatggaatatgataaatagtgtgacatagaatggaaggtggggcacagatggcacataggaattctgaacctttcttgtaaacatttttaatcctctatttaaaagaatacctatcattctcttcagttttgccttggctttacaacattttaaggattgttttctcttgtttcctttaaataaggattaaccttacctttgtagtcatatatctgaaacctgaaagaagaatatattccaaacttttaaaacaattaaaaacatttttattgtagtaaaatacacaaattttaccgtttgtaagacataaatttaacattttaatcatgtttaagtgtttgttgactgatattcagcaccttcacattgtgcaaccatcaccaccatccatttgtgaacttttgtctcctcaaactgaagttttctatccttttgacaataactcgccattaattcagcccttatcaaccattatttctgtttttataaatttagttacctcatgtatgtggaattatatttgcttttttgtgactggctcatgtcacttagtataatgtctctaaggttcatccatgttgcagcatgtgtcagatttttcttcatttttaaagctgagtaataattctgttttacgcatgtaacacatttttatatccactcatccattgatggacagttgggttgcttctccctttgtctgttgtgaataatgcttctgtgaacatgggtgtacaaatacatgtttaagtatcggctttcattccttttaggtgtatactaaaaagtggaattgttggattatgtggttattctaattccaatttttttaaagaactattcataactttttaatcttctccaaaggcaattcttcagttagatagtcctgaatctgctcagtcaatgtatagctttctgaaacaaaatccacaaaatattggtgaccatatgttgacctgctcattatctccaaagatagacttaccagaggtaagatttatctttcttcagcttttgtgattttagaaaatacagagaacataaaggtcattctcaggtagtagtcaaactgtttctgtgtttagagatgatttttataatttgtgttgcaatcagtgttccaattttcatagtttataaagcagtataaatttgtctaaatgagaataaagaaattttcaacaatgtaacatatatgcatttttgaatacttactgttgacatgtaggtatctacatttttgtgtatagtgactctttgtatgtaacatgattgtctccagaatgcagctactttgaatccattttggcttcctctgggtagaaagaagtttgttttattcttctttttgtttcagttacatttattataaactgtttttgtgttaagaaataagatttcacaggttcttggcctacacagtagtacatgtaggaaagctatggatagtccacctttgaaagcattaaattcaaactcaatctattttctccttctattccattgtatgctgatatcagaggtgcaaattgagcatgacccagaattagaaaaagaaagccctggcttgaaaaacagtccaattgatgaaagtgaggtgcaaacagcaactgatagtccctctgttaaacctaatgagcttgaagaagaaagtactcccagcattcaaacagaaactttggtacagcaggaagagccttgtgaggaagaagctgaaaaagcaacatgtgattctgactttgctgttgaaactttggagcttgaaactcaaggagaggaggtcaaagaagaaattcctcttgtagcatccgcttcagtcagtattgaacaattcactgaaaatgccgaggagtgtgctttaaatcagcagatgtttaacagtgacttggagaagaaaggggcagaaattattaaccctaaaacagcattgttaccatctgacagtgtgtttgcagaagaaaggaacctcaaaggaattctagaagaatctccatctgaagcagaagatttcatttctggaattacacagactatggtagaagctgtagctgaagtagaaaaaaatgaaactgtttcggaaatattgccatcaacttgtattgtgacgttagtaccaggaattcccactggggatgagaagacagtggacaaaaagaatatttctgaaaaaaaaggtaacatggatgaaaaggaggagaaggaatttaatactaaggaaaccagaatggatcttcaaataggaacagagaaggctgaaaagaatgaaggtaggatggatgcagaaaaggtggaaaagatggcagcaatgaaagaaaagcctgcagaaaacactttattcaaggcatacccaaataaaggagtgggtcaggctaataagcctgatgaaactagtaaaactagtattctggctgtatcagatgtatctagcagtaaaccaagcatcaaggctgttatagtctcttctcctaaggcaaaagctacagtttcaaaaactgaaaatcagaaaagttttccaaaatctgtgcccagagatcaaataaatgctgaaaagaaactttcagccaaggaatttggtctgcttaaacccacaagtgccaggtcaggcttggcagaaagcagcagtaaattcaaacctactcagagcagtcttaccagaggaggcagtggaaggatctcagccctgcaaggcaagctttctaaactggattacagagatataacaaaacaatctcaggaaacagaggctagaccttccatcatgaaacgggatgacagcaacaataagactttggctgagcaaaacactaagaatcctaaaagcactactggtagaagttccaaatctaaagaggagccattatttccatttaatttggatgaatttgttactgtggatgaggttatagaagaagtgaatccttctcaggccaagcagaatccactaaagggaaaaaggaaagaaactctcaaaaatgttcctttctctgaacttaacttaaagaagaaaaaggggaaaacttccactcctcgtggtgttgagggagaactatcttttgtgacattggatgagattggggaagaggaagatgcagctgcacatctagcacaagctctagtcactgtggatgaagtaattgatgaagaagaactaaatatggaagaaatggtaaaaaaattcaaattcactttttacattagatgaattaattgaccaagatgattgcatttcccacagtgaacctaaagatgttactgttctgtcagtggctgaagaacaagatctcctcaaacaggaacgcttggtaactgtggatgaaattggagaagtggaagagctacctttgaatgagtcagcagacataacttttgccactttaaatactaaaggaaatgaaggagatactgtaagggattccattggcttcatttcttctcagatgcccgaagacccttctactttagttactgtagatgaaatacaagatgacagcagtgatttgcatttagtgactttggatgaagtgactgaagaggatgaagactctctggcggattttaacaaccttaaagaagagcttaattttgttactgttgatgaagttggagaggaggaagatggagataatgatttaaaagttgagttagcacaaagcaaaaatgaccatcccacagataaaaaagggaatagaaagaagagagctgtggacacaaaaaagacaaaacttgaatccttgtcccaagtgggtccagtaaatgagaatgttatggaagaagatctaaaaaccatgattgaaagacacttaacagctaaaactccaaccaagagagttagaattgggaaaactctgccatcagaaaaagctgttgtgacagaaccagcaaaaggtgaagaggccttccagatgagtgaagttgatgaggaatctggattaaaggattcagaaccagagcgaaaacgcaagaagactgaagactcttcttcaggcaaatcagtggcgtctgatgtccctgaggaattagactttcttgtacctaaggctggattcttctgtccaatttgttccctcttctactcaggtgaaaaagcaatgacaaatcactgcaagagtacacgtcataagcaaaatactgagaaattcatggccaagcaaagaaaggaaaaggggcggaatgaggctgaagaaagaagctctaggtgattgggggaaaggaaagaattcactagaaatttgtttagggtccagttgatttgtgtatttttgttatcatttaatttgtaattttcgtttcagaagcaaatattcgtgttgtacaaatttctgattgccctaaatgtagagagactgatggggaaagtatgatgggtttgatttttatatcaaatcatcaggcatggagaaatatcttttagaagtgttaaaataaatgttcctactgtatatttaaaatacc

SEQ ID NO: 1932 - DNA, 4617 bp, Homo sapiens
actgggaggtaaaactccacagagccatgccagcgactgaccgcccagggacaggagatggagacgttcagctgcaaaggctacggaggaacccccgcaattggaatctctccatgccttctgcagcatggaaacagactccgggacctaccggggctctctcgggccacctctgagtgcaagggaaaagagtgcagttcaaggaagggaatgtgtctgtcatcccaccacttgcgcgcaaggccagttccgggatcagcaggcttccttcaccagcacgggctcttcattagcaaccactgggagggaatgtgtgcggagtcatgtcaagatgggaaggcacatgttcctatcttgacagcagcagaaagaaaaatggcagcagaaggaaaacagcagcagaaagaaaaatttgactcagatgggttgagagggcaatggcaagcaatcttggtacatgtcagctgcatctcagacagagtcttgctctgttgcccaggctggagtgcagtagcacagtcatggctcactgaaggctagacatgccaggctcaagcattttcccacctcagcctcccgagtagctgggactataggtgtgtgccaccacacacctggctaatttttaattttttttttttttttagagatggggcattactatattgcccaggctggtctcaaactcctgggctcaagcaatcctcccatctcaggctcccaaaatgctgggactacaagagtaagccactgcacacggcctaaatgcatttttgactgatgatattttcaacttccaatgagtgtatcaggacataaccccatggcaagttgagaagcatctgcaatgcgtgtttaccctcctacaaggatgagacagcccacttctgactagggcagtaaggagctaattcataaaaggtgctgtctaaactggactttgaagattaaagaagattttaagcagctgaaaatggaagaaggaaattgcaggtaaaagtgaaggtgagaaagtgttcgtcctgttcatggaataggatgtttactcttagttatttccatattggaaatagagctttcggctacatgtatataagaaaaatggtattatttaaccacaaatgaagacccagttagcagtttctgagcaaagcaatgacatgctggagtaatgacagaggaagaacaatctggaagtggcctcaggacacacatgtaacaagagcaggggagagacaaagtgtgcattggaaaacaggcagactgtaggtagggtgatcatacaacttactctccaaattaggacactttggggagtgaaaggggtgctattgatagttacactacttggaggctataagtgaatttggtagaggaaggaaagtagtgggacaggaacctgatgacctagcaggacaggaaatcttaggttgattcctatttcttccagtgcagaactgtgtcttgtaattgtttcagtccctcaccaagtctggcttatagccagtgctcaataaacatggagtcaccaactgatgacagataaacacgatccctaggcgtcatgcctgggagatgctgtctacatttctccaaaaggtcaagggtggcaatatcccagaactgtcaagattttcccttttatgacttttaagagtgtttcttcaaaaaccttgttagcaatctacataaaaataatgcaacagtccagttgattagaataaaaagtagaaatactgtacaagaagggctgccttttaaaaataatcagaaagaagcacagtgagcgagatttagactctttggctttatttttaggaggttttttgtggttttatgttaaagcattcaccattactgcaatatttaatatacatttttttaaacccctggaatgtcaaataactaggctgtgcataactctctcatgaattcaatatgtaaaggtacaaatataaggtacccattaaacaaaaacagagaaaaatcaaagaagcacagcaaaattgttacagagtggtttttttaatttttcatttcttgcaacacctcattctaaaagaaaaattatcacaggattgaaaaacaaacttgttttccctttagatcatacataaaacttgactattatttgaagttgataacagaaactggtgtttccaaagatgtcactgaatacaatacttttaggaattgctgaatcaaattttcttttcttttttttttttgtaaatgagaaaggtagagagaactgtaaaatcagtcacaaaacatatggaatactgagggatgagtctaacaatctgacttactcttgtatgtatacacattcattttctcaaattagtacacaccattggaaactgcatcaacccataaaaataactcatatgcctattatgtttttccattttaagcttataatagcagtaacgacctcagcaaaagacatttccttagaattaatggctggctgggaggcagagccaagggccactggttcctcccagctggtcattaatcctcaggaaatgcctgcacctccatcattattgctaaagcaccattatagaaagttctcacagttccaatatatggaaatttgaggccattttgcaagcccatggtattcatgtgagttaataggccaccactgagcacagaggatgtaattatcaaaacgacagaagggaaaatattgttctcctaggtctgtaagattataggaaatggggactagccttatgggaagaggtatatttgaagctaaaagacattaatttaaagggaggtttggaatcacatatataaaagtcagtaaaagacagagcaatccattcccatgacttcgtttaaaactatttttttaaggtgcaaataaaggttatttggaaatttcctcccaaattgataaatgaatattaaagagaatgcagtcaggaagactgtttatacacacaaattattatattcaaccagtgaagtctgggggaatgaatacatttgacagtgctgaatgagaatgggatttctttcttttaaattttggtttaaaaattgaatacacaccattaaatattatagagcaaacattttattctagactttattactgctaaaacaaacaaaaaccctaaagttctgtctttttgtcttagctaggggcttaacacatcaaacaagcattaataaaactgaaggccaaaatgataacaaatacagtgctggtgctctgtgacacagtttcagttctctgcaaaagcttttgctagcttccaggctaaattgaaaataaaaattaggtgttttcaggtctattcattccttccttaaaataaactaagcccaacaaatgtcttcaaaagagggaattaatccaaaaatcacaccaaaagcagtctatcaatcttttgaatgtgttattgtaacaaactacaaatgttggatatgatgctttacacttaatgaaattcactgcagtttctcattatgcattacaaataccagcctggttctaacaggtttaaagttataaagaactgttatgggttgaattgtgtcccctaaaaagatatagtgaagccctaacccaccttgtctctatgaatgtgactttatttggaaataaggtcttggcagatataatcaaggtaggatgaagtcagtggggtgggccctaatcaaatatggctggtgtccttataagaggaaaagagacacagacacacaggaactgctgttaccaccatgtggcaaccaaggcagagaatggagcaatgcatctaaaagccaaggagcatcaaggatcaccaacagcaccagaagtgaagggaaagagatggaacagattcttccctagagccttcagggagagcacggccctgccaacaccatgatgtcagacttccagtttccagactgtgaaagagcaaatttctgttgtggtaaagcacccaagtttgtggcactttgttatggcagccctgaagaaactaacacaggacctgaaggaagagatttatcagaactgtggtcaacattcccaatggaaatccaaggaagatcgggtgaggcaagaggaagcggctcgctacagggaaaagcaatggactagaagtcaggaaacctggctcttgtcagagctaacaaggttgtgtggccttgaactggacacaattgctctgggttttcattttgtcacctgtagaatataagaggatttaactatataatctctacaccaagtctagctttatagatgggaagaccaaggaccacacagaccaacattttaatactttcaaattcactgttctggcattgcttggacctcagggacagaaagcaggacacaggaaacagaactgcagtcttccatttgcctcaagccatgcttactgcagcaatgtggccacatttattttggttgagtaaggcccaaaggagtttgctatggaagcaacagcagcatatgctgatattctataattattttctttcaaatataactttttctgcacttccaagattgtcaaaaatgtctacagctgattcaaaagcatgatttttgtttaaataagataatagttaccaccaaaaataaagaatatcacttgt

SEQ ID NO: 1933 - DNA, 3705 bp, Homo sapiens
agtaatagcagcaactgctacccagccagattttaattagtttctgttccctgttcagagtaccttgtggagctgagagaatacgggcctgtgtactccacatggagcgccttggagggtgagctggccgaacccctggagggtgtgtcagcttgcattgggaactgctctacagccttagaagagctgacagatgacatgacagaagacttcctacctgtgctcagggaatatattttatactctgactccatgaagagtgtattgaagaagagggaccaagttcaagcagagtatgaagccaaactggaagctgtggctctgcggaaggaagaccgccccaaggtaccggcggacgtcgagaaatgtcaggatcggatggagtgtttcaatgctgacctgaaggctgacatggagaggtggcagaacaacaagaggcaggacttccggcagctactcatggggatggctgacaagaacatccagtattatgagaagtgcctcatggcgtgggagtcgattattccactactgcaggagaaacaagaagccaagtaaagttctttcttgggacggagactcttctacctacacagggcctggcaccctataccggaatgtccctgcagtgccagagacgcagtgctgggaaaacaaccacagaaacatctctcctttgtgtatttttccctcccccacctttcaccccacagtggttttcaattagtatttattccatggtggagtctgtgaggctagaatatctcagcaagagcagcatacctccatgttatgaaggcatctgttcagtgaagcactacgaaaatttgaaaccaagggacaagacaacttgcagctgacgctctgacatttcatgacagtttcctctttagggacagctgagttgccagttgtgggagagaacccggggcctgcttttcaaggatgaggagggggcaggaacagaaggcagctgctgctttctgtggaaacctggcccctctggaattggcctctgtgggcattgacttgtcttggcctaggaggcattggtgcctccctggcaagtccttaacgtacagtacctgtagctgtgagtgtggcctgctgcctgcttgtgatgagtgataccgtcttactgtttctgtttcacatagggacatttaaatcaatgtcaatgtgcgtccatgcttgagtgagcaagccagcgtccttgtcctcctgcaatgcctttgggaagctcaggggaatgctccccaagcttgtttctgacactagaatgcaacagattggaaactttttgtgtaaaatgaaaaaaacaaagtgctgttttttttttttttctgtgaaggtcttcagtgttttgcttgttcactgtcatcagagcagggattagacctgttagggaatatctattgtcttgaagtcagagtagctccccattgttgagatcagtgggcatataccaagctccacccccagtgtcagctttgtgcaatttgcctttacctcaccaaaaatacctactttaatatttcctcctgtgtcctctgaatgtctgggcgagcttttggtgagagggctggtatgtcatgttgttatgatacagtcgaaatttgtcaatgcagtgtgaatgttctcttcggccttgttctgccttgtgatcttttcaattcagtgaataaaccaggtatccattttttcaccaacccaccctgtagattgtcagctttttgtttgagagatgcctggtctcacagttacatgtatcagagtgtgtgtaagttgtctgtgttagaaaggttggggtgggggctttgttgcaggggattagactgttctttcttcatcataatttgagatacatcctgagtatgactgtctaaccctttctgtgtggcagaaaaatatgttttccaggtagtttttactactacagagagtctgtaaataagtgctttaaaaaaataacaaaccaataagatatttgtctcctatataaacattctgtgtatttagcacttgaaaatcaacaaatccagaatttaaaaaaatgccacagacttttcaaagcccaactgtacttttttgagaatttgtccgtacctactaatatgccttattcttcttcacctagtgttttaaaagtcctgggtagaaagagttttagaaatgtaatcagttgttcagcttcaataatatagagatctaacatagtcagtcctcaggccccctaaagaaacaagcaagaaagtgagggccatcactagggttggctttggggaggggaaaactaaggactgcttttgccaaatgatatttttgataatgtaaggaaacacagggaccacaaaaccttttttttttttaagtgtgaaagattagtgccttttggcatacttttgattttagaggatatagtatcggcattgacaaatcacgtagaaacaaagaatgctatagatgacaacagtattaaatgttactcctgattctgcagaacagcttttgaagatactggggggtatcttcaagcctcagagcagcttgtttcagatagaaattctctatgggttgaaatgccaaaaacagaaaacatgatgttgactcatgtaatttagtccattttagcagagcctttagtgttaacaccagtggcgaggagcattgcatattctctgtcagcagcagcactcccacaccaggtggttctgggctctctgtaggctggtcctagtaggtgacacccagcaacacccctgttggacaggattgattgttcgcagtcttagaccaacacttcagtcagaaatgttactgggaggaggaaaggaaaatcactttttttcctccatgtggaaatgaggagagaggaaagtggattgcaaaccaaaatgtgagtcagtgtgatgaagcagtggctctgtcatctcggcctttatccaataacaaaccagcatctcttaaaggcgcttttggcctagacacccctgaagtttggatgaagtctggtggattccctgtctgttgtatttctgtgtgcctgttcccttcattgctgtgagttgggagtgcattgagagatgatgtccatctgatatattcctgtgaaataaactgccagcaaactttctaacttgtattttaactgttaaagaagagattaaaaacttcggctttggacatgtccacattatggactgtcatcttatttttaaaagtcattctttacgtttaaaattttaaaataaaaaccttctgaggtattgatgtagtccaccgtgtaaatgttaccttctctccatgctgccattatgccaaaacaaaagctgtgataaaaaaagtgcttgagagagtgtgttgataagaaagtgatttatttacagatggaagtctttgtttcatgaagctaccaaactttaaaaagaatgtcacccttttttttgtttgttatggaaaccagagattgtaaaatggaaaaagaatcgttttttttgttgactttttgatgctggcacgaggtttttgtccacttttttcatatatctgtgtataaaaaaattgttgtttactatggaattagtattacattttgaggtaaacaaaagaatttgtattgcttgataaatattagcttgtaaatttaaagtttctttacttcaactaacttaaaggaccaataaacccataaaagatgctttcttt

SEQ ID NO: 1934 - DNA, 4170 bp, Homo sapiens
aagcatgcatccatccatccattcctccatcgatctattcatccatctgttcattcttccatctatccatctatatattcatctatcttttcatctacccatctattattttatccacccttctattcctttatccctccatccaaccatccttatatccactcatctatttgcccatacatccattcacccaaccatccatccatctgcccattcatccaatcatgcacatatccttgcattcattcatctatctcttctttcatccattcatacatccatccatccacccatccacccatctacccatccatccattcacctatgtatccattcatccatccacccatatatccatctatctattcagccatccagccagccatctatccatccatccatccatccatatatccatccgtccatccacccacccatctatccatccatccatccatccattcatctacccatctatccatctatccacccacccatatatccatgcatccatccatccatcatttatccattcacccattcacccatccatccatccatcatttatccattcacccatccatccatccattctcccatccatccgatatgtctttatcaataatttacagcacatattttctaagtattactcatcagtctgtgctgggggttggagctacatttgtgaacatgacagacccagtcgctgctgtcatgcagctaatatcaagcagaaaattcagacatgaatatagcccaagtggttattttatgataatagtgacaagccttcctgacatcacatgctggatactatgaggacaccttagtccaggttgtgagaaaaggcttcctaaggaggagacatgaaagctcagcctaaagaataagaaatagtgggcagcagaatggcatgtgtgaagctcttgaggtcggaagcaatttggccatccccaaagctggagtgtgtggtgagctgtggaggtggtgggaggtaagaccagaaacatagacagagctggtgacaccagctggggggcctggggagggagaggaggcactgcaggtggggactgagtgacctcagctgggggagggaggagagggccaggtcaccaggcttcatttggcagttcctggtgagccacggggggcattagagcaggaatagatacatctaccccaacagagctgtgttcttttcacagaaggtgactcaaagaatgtggcagaacctggaaggggacaacagaagcactttcagtaaagcaacggcaagcaggtgagtgggcagagagcaagagtcatggccagggtaaatgtgggcagccagtgtcctggcagctttcaccaccaggttgaggagcaggagggtgagagtagcgctttccctactggtagaatttgaaattcccttctgcagtgggtcctcacctagcgtcatcggtaggttcttggaaactgactttaaatgcagcgacatactatatgcactgtatgccatagaagcttaactcatttgtttgtttttttaagagatggggtctcactctgtcacccaggctggagtgcactggcgcaatcattgttcactgcagcctcagactcctaggctcaagccatcctcctgcctcagctttagtctcagtagctgggactacagacatacaccacctcacctggctaattttttttttgtattttttgtagagatgagttctcactatgttactcaggctggtcttgaactcctggcctcaagcagtcctcccactttggcctcccaaagtgctgggattgcaggcatgagtcactgtgcctggccttaactcttgtttatatccattagcctatggtaaaattgtttttgttatatagtaggtcattttgcttaaggttgcagtttccaataagctatccgtgatgttaagtgaggacctactgcaatttcaaggcaggaacgtaggagaactttgtgtgtgatcagaagcagaagcaattctgtatccctctgaatcaaaaatccaagaccagactaggtcgcaactttccttttcattcctttgccttgatgtctccaggaagtcttgtctatctcttctcatttctgtcaaacaattctgttgggtgccaactatctgatagtcatggttccagcctcttggttgctcagcggtagttcatgccagggtggtatagtgaacaaatcccacagagccgctgccctcagggaggccacatcctggtaggggacggctacacaagccaacagatcaatcaatacaaagacaggtgtggtgaagaagtgaacaggcaatgtggggcagagtccctgggcaggagcagagcctggggcaggggctgcttcgtttggggtcagggaaggccctgtgggggttgaagtctgagccaagatccaaggtgagaaggtgctgcttggggagggtctggaggataggcgcccaggtggagggagttggaagagtgaaagtactgaggcaggagggacgctggctttggggagccaaagaaggcccctggggtagacgcaggaaggtggcagggaggctgactccagaggaggccgcaggtgaggcacaggcttgccctcacgtgccctcaaaggtgaggcgtaggtgcatgcaaagggctgtggagttgcagccctaaacctgaaaatctacccagcccctgtgaatgctggatagccacagagggcaaaaaggagcccctaaaagcaggtgacagcctcccaggacgtcgctgaaacgcaaatgtcagattgcaggttccagaatcctcccggaaaatctggagcccgtagggactgatgccagcacgtctgttacctgctgatgacaggagccgtccctggagtaggtcagatgcagctgaggactgagcttctaacagggaagaaggaggccagtggatgaggacgagaccttgggaggcagttgaggatggcagtttggaagttgaggcttttgggtgggcgcagcagctcccgcctgtaatctcaacattttgggagaccgaagcaggcatatggtataatcccaggagttcaagcccagcctggcctggccaacatggtgaaaccctatctctacaaaaaaaaatacaaaactacccaggcatggtggtgtgcacctgtggtcccagctacttgggaggctgtggtgggaggatcacctgagcctagggaggttgaggctgcagtgagccatgtttgcgccattgcactccagcctgggtgacagagtgagaccctgtttcaagaaaaaaaaaaagtacagcctttggagcaagctaggtctgggtttaaattcttgttccagcactgtggatttagtaaataatttcggctctccaagcctcagcctcctcatctataaaatggaactgatggtaggggaggagttaggaactaaataagatgatgccgtgaagacgtcacagtgagttcagaattgggtcttctcagaaaggggcatcttcctggtgtttctgatggtggcggtggcggcggggagacgaaagatttgtgactctgtggtctgccctgcagtggttcaccctgacccttctttgtctctggtctgccctgcagcggttcaccctgatccttctttgcttgctttccagctaggttgcaagaacattcctctactttctgctaagccttggaaacagttgggaaaagtagtttgatcctcacagttcacattcagctcagcagagcaagaccccagagatgcttagagacaggacacctggccatcaaacccagtttggcccagcctggttgggtgactttgtgggagccacttaacagctctgggtccctgttttaccatcctgggagcaaggccctgcagctccacgagacctttaccccgggaagaagccgccacccatgaaagcatttctgaagcccctttctaagacaaggctcagcatcttgatatttttgacagattcctcccaagtctggctctgggaggtatgtacccatctcaaatgttcccaagataaattcatccttcaggaaatggaaatgaacttgcttactaatgtgtgattcctagttgtagccaccggatgtgctgaggcctaaatgttagcaggtgggaggaggccacagaacaataaaaacaaccaaat

SEQ ID NO: 1935 - DNA, 4132 bp, Homo sapiens
gatgaccgagaggggaagtgtggccaggccaacccagggacctgaaaccccaaggagcccagagggcaccacggaagctgccacccaggacgggaaggaacagccagagcttccatgtgccatggccatgggcacacccagcaccacggagaggatttccacctctggccaggtccgatctgtgatcaggaggagctgggagtctggccacgcacaccccatgtcccgggagccctcccctcgccgccggctggaccctgccaccttgagcaggaccccatcccaggaacagctcatcgcggagctgcaggggcggctgggcatccagcctgaggcagaggagccggcggaggcggcggggccctctgcccaggactggctgaccgagggcgtcatcatcactgtgcagccacgtgggaagcgggccggggggcagctcgtagagaaggtggcgaggagatgcccatggctggggctgggccagagccaagcacctggggtccgggttcttccctggccccagtgctggccggaggggagatctggggagagggtgggggtttcttgcctcctgtgactttggaagactggccccactcttggtgcagagtgggaaggcccagggggagcctggggaggtcccgccacccctgtgggctgagctggcgatttcttcctcatcgctctccctcctttcttctccccaggttgtcttccctcctggctctcccattcccctgagaagaaccatctctgtcctggcttctccttctgtccctttgctccagcatcgcacagacgccgcggccagcagctcttctcccctgcccagcctgctcgcctcctcccccctggggccctcagcttatacctgtggttcttctggggtccagagtgcaggggaagagccccatgatgagggggtgcagggccctgcccttcccattcctgcaccccacaccatgaggtccgtgggctgccagactgatgaggacccgctcttccccccgatgcagaaggtccgctgccctcttgcttttctgtgggtccacccatgtctgctccttcctcgactggtcctcagtactgccccgggctcccatcgaggaaagaagccactccagaagggagaccagaaacctgtctcctcccttccagcccccaggcccagcgcccgatccagggcctggagcaaagagcggatggggagcggtgctgggcggccggctggcctcgggacggcgggcggagcagccccggagggcaggacgagggagggggctcctggcccctggaggaggttgtacttcttgtctccatcagctcatctgtccaggagggagaaaagtacccccatccctgtgctgccagacaccgtaccccgagcctcaggagtcctgaccagccccctccgtgtccacagttcatggcccaggggaagacagggagcagctcaccccctggggggcccccgaagcccgggagccagctggacagcatgctggggagcctgcagtctgacctgaacaagctgggggtcgccacagtcgccaaaggagtctgcggggcctgcaagaagcccatcgccgggcaggttgtgaccgccatggggaagacgtggcaccccgagcacttcgtctgcacccactgccaggaggagatcggatcccggaacttcttcgagcgggatggacagccctactgtgaaaaggactaccacaacctcttctccccgcgctgctactactgcaacggccccatcctggataaagtggtgacagcccttgaccggacgtggcaccctgaacacttcttctgtgcacagtgtggagccttctttggtcccgaagggttccacgagaaggacggcaaggcctactgtcgcaaggactacttcgacatgttcgcacccaagtgtggcggctgcgcccgggccatcctggagaactatatctcagccctcaacacgctgtggcatcctgagtgctttgtgtgccgggaatgcttcacgccattcgtgaacggcagcttcttcgagcacgacgggcagccctactgtgaggtgcactaccacgagcggcgcggctcgctgtgttctggctgccagaagcccatcaccggccgctgcatcaccgccatggccaagaagttccaccccgagcacttcgtctgtgccttctgcctcaagcagctcaacaagggcaccttcaaggagcagaacgacaagccttactgtcagaactgcttcctcgagctcttctgctaggtgccctgcccctgtctctgccccccttccccagccagcatccccaactgcgactgtgacctagagacttcacccgggggtgaaggggtaaacccgactgaaactggaacccttgtcctccgctggtgcgggatggacagagggccatgaggggtccccctgcttgtcttcacccctgccagagcctctgggccccctcctccctcctgtagctctccctaggctgcccactctccatcctccccaggggtagaggctgggggctccaccccagcccatgtacgtccccacgaactggcctggccagcaccccacactggagccatctcttcctcatatttcagcagtgcagccggggggcagggaagggcaggcagggtctgttggggtctctttttatccttattcctcccccgacctaattgtctttgttctgtgattattgggggacacccggctccctccagacaatgccagcataaatccatccatccaaaggcagagaaccaaaggggccatggaaggttctctgtgctcctcctacccttccagtgccctaggcctggcgactgcccctgccttttagacccgccctccccttttatacctgctcttgttctactgagaaaagcctctccagcaataatgttttctagtcacttcctccgtctccgggacggcgtgcctggacactgtaccgactttgatagatttctacactgaggtttgaattcatatcgcctgagttgcttttacttctctatacaaaatgattttgaagagattttaaagacgttcccttttgtattctcttcctcatccaccgccactgggcctgtcactgatggtggctctggtgtgaagtttgctttgtactgagggttggggtggggaagcaatttgtattttattgtttcttagcacaagcaggtgaactgggagcagctctgtgactccccctctttcacttcatagctcaccaggactgttttataaactgctgtatttggaaaccccttctttacttcccaggccagcaagctcttcactgaaactggttgaagggtgttgcacccttttgggcctagaattctgaactttatctgttctgtttctgtgggaggagaaggggaagtatgttttggggggctgcttcctgtctgagtaagccctcaggagcctctgctcccctgtgaacccactgaaccttctgagcccccactgcttctatggggctctctcttctgccttctcaggaaagctggtgtctgattttggccatcaggactctgacgtctctttggtcttgttgatttcctctgggcatatcccttccccagatctgctcctcccctttcacaggtgggatcggcactcagggggtctggaaagaaggtcataagggagcatgataggatttggggcagagggacaggctcctctggggaaaccccccagagctctttaccaaggatgaaagaggagccaggccttgggctcctgatgaggagaaaggggccccaccggggtctaatggtgacagtccaaaccactccactggcctcctggcagaagccgagtgtgctggggtctccgaagagggtccctcctttttgggggaaggtcagcccagcccctccaaaggtctgatgtctccactttcacccgcaggccttaccgctctgtttatagtgacccaccctagatcttccccaagagggactggggtttctggggtccattctctgagtcagtggttatttgaaaatttgattttgattttattttttctctgtaaacttccaagctggcttttcccatttcaattcctgtgatttatgccaataaagtttgcccatgattttc

SEQ ID NO: 1936 - DNA, 3356 bp, Homo sapiens
aacggacctcagaggttgtctgaaggccgaggccaagatggcggtgctgtcaggtgagcgcggcaccggcggcgggtgtggggccgcgcgggtctggggccgtgggagcctcgggtgtcgtggtggcgtcgggggtcggtgccggcgtcgtggccgcggtcctctccgggcttctccgagccggccgctcctcgggctccccgcccggcttgcgatgaacggtcgccgttattgcgtccagagtacagtcggggaaaccgaggcccgctcctggcctgcgcggcttccggatccttggtctgcgctccagcgtgggcctggctgtgcaggcacgaggtgtccatcagagcgtggccaccgatggcccaagcaggtgaagctggccttccgggggaggtcgtaccccctcgccccacccccatcccttccttattttctgcatcagtgccgcagccactgaggtgcatggatggggcagggagggggtcacacatcccagtccctgacctcatgtgggtccaggcctctggcagcggccgtgggggctcgcatccgcctctgggaagcacctgcgtggctgacgcctcctgtgcccgtgtgtctctgtgccagcacccagcctgccctgccaaaggccagagccgtggctcccaaacccagcagccggggcgagtatgtggtggccaagctggatgacctcgtcaactgggcccgccggagttctctgtggcccatgaccttcggcctggcctgctgcgccgtggagatgatgcacatggcagcaccccgctacgacatggaccgctttggcgtggtcttccgcgccagcccgcgccagtccgacgtcatgatcgtggccggcacactcaccaacaagatggccccagcgcttcgcaaggtaggcctcgtcccagccgcccagccgcccccagagtgagctgcgcacggaccccgcctctcttccaggtctacgaccagatgccggagccgcgctacgtggtctccatggggagctgcgccaacggaggaggctactaccactattcctactcggtggtgaggggctgcgaccgcatcgtgcccgtggacatctacatcccaggtagggccgggaccgcaccgcccacgagggagctggagacagggccagcgccacacggagcccggcggcccctgtgagggagtcccacacccccagcagacggcgggctcccccatcctatggatgggccgactcggagcgttgcctcttagtggagcctgtcccctgtgagaagtcggcgatgtattcaggcatcagagggatcagagggagcaggggaagctgagtggaattcctgacacacgcctggtttacagcagtttcatatggtcctacctggcacaaaccaaagacctgcagttagaaataccaagcgagaaggttcctgggggccaaggacactgtcccgcgccctcagccttacagaagggcacgcaggactccctgggacccggggtggccggatttggcaaatgaaaacgtgggaggcttagtttgactgtgaggttagggtgaatttgaccatcaggaaaactgttagtagtaattgtttagtacgagtatatcccaacaatatttgggctatactgacactaaaaagagcattggctgcatacctgaaattcacatcgcaccgggaacattctttatatctggtgatcccgtgggactcttgcacctcacgtggtcccacgagggccatccccccgggcgttcaccttgacagtggtccacggtaggcaggcttggaggtggcgctcatgtgggacaggggacagagtcctgttcttggccaccctgtgctgcgtgcggcattagctcatgcgcagagagcccagccctgagtcccgagtctgggggtttgggcaagcgagaggcacatcctggtgcctctcaaaagtggaggaacaggctctgactttggattccgcttccctggaaagggcgttgatttgttcagcgttctgcacggttcaggtcaccccgggggcagtggagagggcagcctgggcctccctgtgacttgacagcacagagaggtccatcctggggtcaggagctctgcccatgcccctggcgtcttcccctgcagtgcagaccaatggggcaagttgcgagtgtggactgtactcctccctccttgcagactgagctcctccctccctggggaccgcgctcctccctccctgcggactgtgctccctgtctggggactgcgctcctccctccttggggaccgtgctcctccctccctccctgcggaccgcgctcctccctccctggggaccgcgctcctccctccctgcggaccgcgctcggccctccctggggaccgcgcccctccctcccagcggaccgcgctcctccctccctggggacctcgctcctccctccctccctgcggactgtgctgctccctccctgcggactgtgcttctccctcccttggagcagcctggacttgccagagctctgccaggtggggcctggccgccctttcccaggccctgcagtggccttgtcctttctcacctgtttccactcctgctgtccccgttgggccctgggcttcgtcctcttgctcaagccctttgttctgaacctgcgtggcagccgggactgggggatccccagcaaagagctctggcttggggctcagaaagagggtcatcgggtcctcgtgggatgcccgggctctgggccacctcccctccctccgcccagcctccctgcctccatctccgtccagggcagccccgggccctgctccccactgctaagtgtgtctgctgagcgctggcccccattgagtcctgagggctggggccgggggccgggttagtgaggtcagcgtcttgtccgagaggtccctgtgacagcccgggatgagccacgggtggagggcagtggggccttgcccaggggaggaccccactcttcctgcagggacctcccctgcgccggctcccagtccctggcactgcgcccacccagggctgtcagcctccaccttcagaggccggcccgggaaacccttccaaagccgagccggctgcgctgtgcacgcggtcacgcgggctccggctgcgggaagcgagactgaggcaaggtccctgcaggctgcccacctacggccgaggccctgctctacggcatcctgcagctgcagaggaagatcaagcgggagcggaggctgcagatctggtaccgcaggtagcgccgccgccgccgccgccggagcctgtcgccgtcctgtccccagcctgcttgtgtcccgtgaggttgtcaataaacctgccctcgggctgccgcc

SEQ ID NO: 1937 - DNA, 4232 bp, Homo sapiens
agcagcgggctgagggctgcataactgatggaaggccgggcgcggtaagagcgtctcggggagtagggcaaggcggccgggcccctcccattccgccttttcttcagcgtcctgcccgcggcactggctgcgggtgccgggccacctgcgagtgtgcggagggattccggacacccgcggcggcgagctgagggagcagtctccacgagaactgaggcggaccctctggcgccatgcgcgccctccccggcctgctgggggcgagggcgcctacgccccggctgcttctcctcctccagtgccttctcgccgccgcgcgcccaagctcggcggacggcagtgccccagaacattctagtatgccagtagaaaaaaacatcactttagaaaggccttctgatgtaaatctcacatgccagttcacaacatccggggatttgaatgcagtaaatgtgacttggaaaaaagatagtgaacaacttgagaataattatcttgtcagtgcaacaggaagcaccttatatacccaatacaggttcaccatcattaacagcaaacaaatgggaagttattcttgtttcttctgagaggaaaaagaacgaaggggaacatttaatttcaaagtccctgaacttcatgggaaaaacaagccattgatctcttacgtaggggattctactgtcttgacatgtaaatgtcaaaattgttttcctttaaattggacctggtacagtagtaatgggagtgtaaaggttcctgttggtgttcaaatgaataaatatgtgatcaatggaacatatgctaatgaaacaaagctgaagataacacaacttttggaggaagatgggggattttactggtgccatgcactattccaattagacgagagtgaagaacacattgagcttgtggtgctgagctatttggtgcccctcaaaccatttcttgcaatagtggctgaggtgattcttttagtggccaccattctgctttgtgaaaagtacacacaaaagaaaaagaagcactcagatgaggggaaagaatttgagcagattgaacagctgaaatcagatgatagcaatggtatagaaaataatgtccccaggcatagaaaaaatgagtctctgggccagtgaatacaaaacatcatgtcgagaatcattggaagatatacagagttcgtatttcagctttgtttatccttcctattaagagcctctgagtttttagttttaaaaggatgaaaagcttatgcaacatgctcagcaggagcttcatcaatgatatatgctatctcagatctaaaggtatattttcattctataattatgttacataaaagcaatgtaaatcagaataaatatgttagaccagaataaaattaattatattctggtctccaaaggacacacagaacagatatcagcagaatcacttaatatttcatagaacaaaaatcactcaaaacctgtctataaccaaagaattcatgaaaaagcctttgtcatttgtcttagaaagttattttttaaaaaaatcatgcttactattagtatctatggaagtatatgtaacaatttttatgtaaaggtcatctttctgtgatagtgaaaaaatatgtctttactaagttgaaatgaatactttctgcctttgctaatgatagttattctataatctccacaagaaaaacataccttttatccagaaatattggtttaaggcaaataaataaaactgtgcttgctctaaagctctgcactacaaaagcaaattttccagtctttattccactcataaccactgctttccccaccaggctaaagtgcttcttagtctttaggtagggttttgaacttcataaggtacaccgttgttcatgttttagggtgcaggtctgtatagttgtaatacttaaaatactgctatactgatgcttttgtggctcatggtttcctgctgtctttgatttaacacctggcttcctggtatctatgactggttaaatatctaaacctgcattattagtgctttacaataataattcccttgactgaagtccagaagtactaaagtacttcttttttattgctgtgaatgccttagacttaccttcaaaagtaggatacttcatttctattgcatatataactgaaatattttataaactcactgtaatcaaatcttataaaatctgaatcgacacgaaaagttgtcagtgcttgaatgaaatactaaaatcatgccacaggatactagataatgtaaatgaccatgatgtgtccttggagctgatgggtgtagtgtcccactgctcacagggcaacaactttaataacagaaacaaaaagtggtggtgtggaacccaagattcttggcgactaggggatttaaaggttggggaggaggaattcaatgatttgaaaagaaatactttataaaaatttgctccatgtattggctaagaaaaatataataaaattttggtagtgaaaattatatcgctaatgtttaccagtattactagtatgaataatacacataaggtagtgacttggaagctgctcaatacttcgttgctataacaaaatgcaatattttgttgtaaagcatcttaactacacatataagtttgctgaacttgaatacatcccagtaatggcaaactttattttattcttggttttcattttattctggtctcagggccatacatttattttagtttaattaattattattttgacaacattactcgggtgatatctatataatggtagataaccaatcagttagcttaattaatctaaactatttgaattcagggaaatattagtcaaatctgctgtttgactaaatacaattcaaagcaatatatttgtgactgggaatatagaacacaaggaaacaaatgcgtagcccatctgcagtatgcattcttccattttacaaccactaaccattgaggctgatacaattttcaagcaagaagcattgcttcccaaaggtaaaataatcagaaatatttctatagtaaattgaatttttaattggcaatactgcttatttttttctagcaaagacaatttatttcagtaaccttaaataggaaaagtactcaaaaattaaagttgattttttggctttttgtagtctctctagaggtcttctagaaaattaccactgttggattttaatctgcttccattaaccaatcttacagagatgataagtggattaatactgaccaactataaattgactgcaaataataagccacataaaagctgaagtaggaaaactactccaagtttatatattaggcaccttggggaattctcttagtctttccagctaacaaggattttcagcataataagtagatttaatgatggcataaaattcccagatactttcatatacattttttgccaaagtgtaaatcttctccttttgcagtctttttattatcccaacatctagctgctcaggccccaatctagaactcattctgatattttcttcttctgtattaattaatacttatgggtcatgaatccctgctcctttgacctttttaatagctcatgaatccaccccattgcctccccaactctgcccacaccagctgcaacagctaatgccttgattttcctacctcagtctccttttctattaatccctcttttgcatggctgcttgagtccactttctcaaacacaaacctcactatgcaactttggaatctctgtaggcttacctttgccatttcttaatattgcattctccaaattgctaatctctatccagtctcttgaactagacttggtacatggagattccgctcagaaagtgctcttcacacttctacctgcttgactaaccccagattatctttcaagactttaatctgatcttgtgtcttagagaagcccccatacctagtagagcatgtaccatcttacatgcttaagtaactccacatttatttgtgtttattactctgtgttataaatatacatttgttggtctctctcttggattattttctttctttgtcctgtaactaccactgaaagggtgcaatacagatgtcttgaaatgtgtgttgaatggatgaatatataaataaaaatgaaattttgtaaatttctacttattcttagaaaaacaatctaaattgtgacaaatcagaattgaaaaaaatattctaataaagaaaaacaagcttt

SEQ ID NO: 1938 - DNA, 5440 bp, Homo sapiens
aagaacagcaaacatgtcatgtgcccactttgtgcctcaggagaggtagcccgtggacatcgctagggcagaggttttaatatctgggacaaagttatctcccacggcgaggtcgtggctgggaccatgtcatcttcagccgtgagctgctgggctgggcaatgtcttctgggatgtgagacgtggggtctcctttctaagcggacccccactcgtgctgatgtgggtcccagcatttgccgcgtttggttgaaacagtggcttacctggagggtctgggtctctggatcataaaccagcgaaagcccccacatcagtggtgacaagatcaatagaccccagaatgtgtgcagctgtgcttgatagggttttggttcttgctttttggtggaagtttaggctcaagtgggtcccgtatcggatgagcagctgcacggcctgtgggagccctggggttagtgggtccaggagagaatgtgttctctctctgggctccagccctgatggggtggggataagatgcaagatttataggaatagggggaaacattatggaaggccccaatatgtaatgagcttttatatacaagaatgcaagacatagccctctttttatgtttaaaggggactatggtaatgttttttaaagtttgtgtgaggtgtgagtcaaccgaaaggccctaaattaagagagattcaggtttgtggtgcaagatagaggcccatttcggggtctgtttgcagaccagaatttgaaatggagttgtttgaggagaccattgtgtgtcttcgtgaaaccgattgtgtggaacctatcagggctgtggaagttgtagcgaatgccttttcccagagcccagcattgtggattccgagaagtggcatgtgtgtctcagtgacttccagtgatgcctgccactctgaagagatgaaggagtgtcctggcaagacctggaatcccagctgtagcacctgtggagagatgtgatttagatttggatttggggtatctgtgaggaagagtcccagagtttttcatcctgaagggggcaactcttgggcagtggtccaacagttggccataaatgtgaagctggggcgctgtgctgaccagggcatccagcgttaagacgactgcctaactttggccacatgcgttgttttttgggttccgtttcgtatcagggcatgctggctaaaagatgggaagcagcaacattctcttgggctccatcatttatatgagggttggcaatgccatctgtaccctctgtgaactcccactgctgttcactcagttaatctaagggacaccaaggggtctgcgggaggatgacctcacaagggactgaggacatgggagaccaccctcctgtgggtagaatacaccagagggcccaggcttgactctgtcctgtgttaaggaggcatcggtagttttgctgagcttgtcaggtgtttataatggacagttggagattggggtcctaggcttaggtctttgagagcctctgtgtccaggagagcccagtaggcatccagccatttactgctttaatagggtagcatgaggctgagagggatagtttcttgcatccaaagcccttaggcaccttatgtccatcctaagtgggccagagactccagggctgcatagagcttgccagagcttctataatgaaggggtctctgagggcaccaacaggagtgcccatggattttaaggtttgattatagaggttgtttatggagggtgccccatttaaagcaagctgatttgtaagcagcagcaagaagattaagtaaaatttgtaaatgaggactacattgccatcagaacctcgaaagtatctaaagatgttggacttgtatgtccttaatgagtgtgacaatgagtttcctcatttgtgctcctggagaaggcggatgtggtgaagaccctgtctgcagacattgtgtgccatggcaaagccgtggagctccctgtgggtggcctgcaaaggtgtatgtgcccctcagggcagaaggcaaacggcagccaagaagctgtgcaagtagacacttaatgggacatgttagccaaatctgtaagagcaaaatattggccagttatttattgtgtagaattaataattttaataataatggaaattgggtaatggatgggactgcagcaataaggttgtagtaatccaccatgaggcacacttgttttcttccaggtttaaggataggaaagattgggctgttcaatggagaaacaagggtataatcacccctttattaattagtaagttttaatccttgaatacctcatattaactgttttaactggaggtccatggggcatcattttatcaagctagtttataactgccaaagactgactttaattttaatttattatttgttttattagagtgtctgtgttcaatatgggatattagggcgttgggtactatgaccacaggaaatttagacaggctacagttaaagtgaagcataccttacccatccaccccccattttatatttagttgcctttttaaaaagattataggggtacaatgtttagatttagtgggatctccaggtataactgtaatttgagccccagtgttaagactatgaagctttgtcaatgggtacattttagcaaatgttacaattaatttagaacctaagttatggagacacaaaagccaataggcacccttttatgttttggttaaatgtttcagtatatacatcttatttatttgtaatattagtatataatttgttgtatacatttttagtgtataagcgttggatttctaattggatcagattagagaccttccgtttagctgcatatgtacatatacatgtacaatttattatatatttgcgttaaaatagcctatctgcatgtgtatatatgtgtgtatgtgtatgtatatgcactcacacgcataaatacacagtctatttagttacctttaatgttttttcccttgtacctaggctttttctcgctttttcctttttttctgtttttgtggcaatttagctggaaggaggcggtcccagcatgttgacaggcagggtgttcagagtgcccaggcacactggtggggggtggttacaggctcacgtagctcaggggcttctgcaggtctcaggggagtgggaacaaagtgtcccaccccttccccttttcctcaaacctcaagccactggtctctatggatagatcctttgcatcccaccggattgaggaatgagtcacaacagctgcaaggctcttaaagcaacatttaaaccttttggcggctgtcatttctgtgaggagggtgcctctcaccggccgcatggccggaggatccctgcagcgctttggagaccaacacccagatcctttgcccaggagtgcgattaattcctcactggatgctgggggagggcccctcaggtgagcagcccaccactgacttcagcgttgctggctcggttatcagactctcatccaacacaagctcacagggaaagccgttccttgctccttgtggagggagctaccgtcattgccctgagaccaccagccaagaaagtaggtatgtccaggtagggaattcagagggacccagtgcatccaattatacaattatacccagaaggtcctgtgtaggggactgcgattgacatcaccctagtctgcagcaccaaggactgaatgagctcagtcctcttataatttaggctggactgtcacagacactggcagacacagcatacgtggtgcagccaaagtgcaaacatgccagcagcggccatgctccccagggtgggggtccagttagtaagccacgcgcagccaagaggcgaggcatgccctgtgccacacacggactcaccctgctcactgtgcccgtggtatcgaaatgtacccacgtttaattcataaaggagaggctgctgtcattgaaagaaaagtttgttacttgcatttctggggaaaaggagcgcaccaggccacgcagggccacaggaggaggacgcaccagagtggtcaggaggcagaactaggcgagcagctttccactgtgtctccatggcaaaggcgaagatgggcgggggcagagtgtaggattggcaggtttgaatgtcttgggcagtagctacaggggtggtctccagctgcctggtgcctggccctgggtgatcagggtgaggggatactgccttctgcagtggaagagtcaaatcgaggagatggactctgagttggttagtgtgcaaaggtgcactcccaagggacccctttgctatctctaagaattggcctgccctgggaagggcagtctctccccagtcagtgaggtccccaagatgtgaaaacattatacattataaaaaagcatgattaatataagctcattctagcatttcaggttacagcttctagaagaggtttgtagtctcaaatgagtaggtttttcctctagagaggggcgggcctggaccttcaagcaccccttggtgtgtttaggagctcaggagcagaagcacctgcctgcagccctgcagctaaggaagttctctcagtcactcagagcagggaggggctgagagagtcatgtgaggctcccggggtactacgacagccctcgaggtgaaggattggccctgatcataatagagaaccctgaggaagtttactgtcatgagtctcggctggttggcgcatgtgacctttgaaggatgaagatggagtttgcaacatgagtatctctaaccttttgcttttcagggatcattttcaaaaattgcattggggccttcgttatttaccatagtattttcactttcatagttttgtcacctttttgtactgtgaacagttcaaccagtgaccgacttctctctcatgctgtttaccccacacacaatttcccactcaattctgaaaataagaacctgttaataggttggaaagctgtgtactctattcatatattgttctttcatgctagtggagagtggtgtcattagcatcttaattttagagttgtgagatgattttaccaattaggaattgaatgtgtattttttttctgtttaataagaagagcaaatttgaataaataagctggtgtagataaacttaataatcatgctttttcttgtttggagataggtgatgtgttgtcatatcctgtgatacaggtcactcatctggccttctgtttctgaagtttaagtctggtttgaatatgtaataatactactcagcatttcttgttgcctaagtgagacgaaacttaaatgttatgatatttacttcatgtattcttgtactgttcatttcaattaattggtattgtatatctaatatgtgatatttgaactgaataaaacttacagtgttgtaaatgttctttaataaataatcacacct

SEQ ID NO: 1939 - DNA, 4618 bp, Homo sapiens
gtgctgggagctgtggtccgggtcggcgggcgcgcaagttggctagtctctgcggccacctccggaagggtccgccggctgtgctggcccagttccaaggctccggcatcctgtgtctcactgagcactgctgcccgatggccatccccaagcactccctgagcccagtgccgtgggaagaggacagcttccttcaagtgaaggtggaggaggaagaggaagccagcctctcccagggcggagaatccagccatgaccacattgctcactctgaggctgcacgcctgcgcttccggcacttccgctatgaggaggcatctggtccacacgaggccctggcccacctccgagcgctgtgctgtcagtggctgcagcccgaggcgcactccaaggagcagatactggagctgctggtgctggagcagttcctgggtgcgctgcccccagagatccaagcctgggtgggagcccagagtcccaagagcggagaggaagccgctgtgctggtggaggatctgactcaggtgctggacaagagaggatgggatccaggagccgagcccacagaggcaagctgcaagcagagtgacctgggagagtcagagccatcaaatgtcactgagaccctcatgggaggtgtttcccttggacccgcctttgtcaaggcatgtgaacctgagggcagctcagagaggtctggactatcaggggagatctggacaaagtctgtcacccaacagatccacttcaagaaaacttcagggccttacaaggatgtccccacagaccagcgtggccgtgaatctggtgcctcgaggaacagttctagtgcgtggccaaacctcacctcccaagagaagcctccttcagaagacaaatttgatctggtggatgcttatgggacagagcctccatacacctactcagggaagaggtcctccaagtgccgcgagtgtaggaagatgttccagagtgcttcggcgctcgaggcacaccagaagacccattctcggaagaccccatatgcctgcagcgagtgtgggaaagccttcagccggagcactcacctcgcccagcaccaggttgtccacacaggggcgaagccccatgagtgtaaggaatgtgggaaggccttcagccgagtcacccacctgactcagcaccaaaggattcatactggagagaaaccctacaaatgtggggaatgtggtaaaaccttcagccgcagcactcacctcacccagcaccagcgggtgcacacgggggagcggccctacgagtgtgacgcgtgtgggaaagccttcagccagagcacgcacctgactcaacaccagcgcatccacaccggggagaagccctacaagtgtgacgcgtgtggccgagccttcagcgactgctcagccctgatccgacatctgagaatccactctggagagaagccatatcagtgtaaggtttgtccgaaggcctttgcacagagctcctccctcattgagcaccagaggatccacacgggagagaagccttataagtgcagcgactgtgggaaggccttcagtcgtagctcagccctgatggttcacttgcggatccacatcacggtgctgcaatgaccggaagtcgcccctgggggcgtagcacagcgtcttctcggaggctcgaggtctaagagaaacgctgagttcctgaagagccacagacagggtgggtgattgatgagttgtcaaaatgataggtgcctgagggcagactcgggctgtctaggaaccactctgcatttgaggaaccctgatgagcacaaggtgattcaggccagctggagaagcttccagaagggccctgcactgctaccctctatttcccactcagggctgtcccagagagaaggcagccgaactgaggatttagactggttctgagggccagggcaaatgaaggcgcatgtctctcagaactcagcgtcccaagacgctctgggcgggccaactgtagcttgttctcatgtggttcttcttgcctgcttttctgctgcttagcccagaacggacacctgccatgcccacctctgtgccttggcacctactatttccactccagactattttgtgcctaactgcaaggctgacttttgagactgcctcttccacgatgccttttctacactctgcctctctcatggtttcctgtcgtaatcagtggtgctgcttgacacctgcccagcatgttcctgtctctccttttccttccacatcccaccagtcaccagcgctattgttttaacctaaagcttatctgtaattcacctccttttccaccactgctaccttatgtgagccctcattgcctcttgcctggattatagccggggtctccttcctgaccacttcctgcctttattctctgcccctgtatcactctccaggggactcttgatattacttagatctgactgtgtcactccaaggtggaaagctctccaacccatcttctacagcacagcttcctgaacagggtataagtatgctgagatgcaggctgctctgggccccgagcaacctctccagttatcctcatatgcatgtatgaatactgtcatttttctgtgcgtgcagtgaaaatggcctcatctcataccatggctccaccttccatacaccagccacacggaactactgtggtccctgaaggagccatacattttcccacttatgtgcctttgtacctgtgcctggaaccctcctcttctttttctttttcttttcttttcttttttttttttttgagatggagtctcgctctgtcgcccaggctggagtgcagtggcgcgatctcggctcactgcaagctctgcctcccgggttcatgccattctcctgcctcagcctcccaagtagctgggactacaggcgcctgccaccacgcccagctagttttttttttttttttgtatttttagtagagatggagtttcaccatgttagccaggatggtctcgatctcctgacctcgtgatccacccgcctcggcctcccaaagtgctgggattacaggcgtgagccaccgcacctggccctcctttttcatctaaggtgtttcaaatgttgcccaaagaaacctccctgctctccgggagcagacttcagcttgccctctctgcttccagagcacctcctagatacctctcttacaactcctgccaccttgttttacttatttgctccttgtagagctgccttttccaaggatgccataaactcctgagagcaggggccatgtcttactctcagtatctacaacacacaagactcagtaggccctgactgatgtctcttacatgaatgtgactggtgcccccaggaggcagtcaccgtgctgtctctgccccacattgtccttatgtatgtttacatggatgtctccccagcagcttgaaccctggagagcaagaataatctgattttcctgggggccagcacccaaataagcctggcatgcagtggcctcaataaaatgtgactgtattgagtcattttctagggccccagatcccctggtgtcatggacttagtctttgccagcattctgtccatgtgttctctggtcttctctcacaatgctgcatccctgtcccatttttagggtccctgtctatcactggatgctgcagcttctgttcattactgttagtgtatcattcttcatgcctctgtttctgtgatggtctcatcatatgtgaaccatttgacctggcgtattgtgtactagtcaccgtcaccatctctccatatgtatctccctgtatttcgggcccattccctctatgtcaagagtaaatagaggcacagagactgatgagaaacgttcataacatgaaggtaagactcagggagacagagactttgtggaagtatctctgagggagtcccagacacaggcagagagggccacatatcgtgtgccagaggctgagagactgagagggatgacaggcttaggggaaaactcagagaggagagatgcacattcctagtgaaattgcacaggcttccagcatgctggagggaacagaaaaggcatgggcctgaattcaggctgcagagcctgactcctccctgtggctacttttgggacctaagataagtgactttcctgaacctccatgacctcctcatatgtaaaccagggacaggacccaccttgtgtagtgcctgacccaaagcctggccctgcacactgtctctgactcacagcaatcatcagcacctctctttgcctcctacttgctcagtctctgtcacaagaactggatctccatccccttgatgctctgagcatcttcacccatttggtcgttgagacatatctgtccatgtctgtctaaaaggggaggagatgagggagaaaaaagggaatctactcagagcctgtgtgtgctgcccagtctaccaaataatttatatacatctcagtcctcacacaaccatccctgttttatagaggaggaagtggcttagagaatgtaactgaccaaagtcacactgccaggaactggaagcactaggatttgacagcatatccaaatatgtcagcaatttcaataaacatgactgtactcaac

SEQ ID NO: 1940 - DNA, 4193 bp, Homo sapiens
aatacacaactctgaccagtatccagctcctggactgttttgtgatcccagtcgtgattttgctctcctggttcttcctgctgatccggtacaaggctgtgcatttcatcggcatcgttgtctgcatcctgggaatgggctgcatggtgggagcagatgtgcttgtgggaagacatcagggagcaggggaaaataagctggtaggggaccttctggtcttaggaggagccacactctatggtatttctaacgtctgggaagaatacatcatccgaactctgagccgagtggaattcctgggaatgattggtctctttggagcatttttcagtggaattcaattagctataatggagcataaggaactgttgaaggtgccctgggactggcaaataggactgctctacgttggctttagtgcctgcatgtttggtctctacagctttatgccagtcgtcataaagaaaaccagtgccacttcagtcaacctctccttgctcacagcagacttgtacagcctgttctgtggattgtttctcttccactacaagttttcaggactttatctcctgtctttcttcaccatcctcattgggctggtgctctactcctccacctccacctacatagcccaggacccccgagtgtataagcagttccgcaatccttcaggacctgttgtggacttaccgaccacagctcaggtggaaccctcagtcacctacaccagcctgggccaggagaccgaagaggagcctcatgttcgtgtggcctagggtgaggcccgccctgccaactgaggccaactcattggccatgtttttgcccatcatctctgtattgtacatagagaaaggtatttactaggtgcagtttacacaggtggactgcaaggtagcaaatcctccaaaagcttgtgaaaggaacaagctcaacatcactggagacacaggctctaatccacctgacttggaaggatgcctagctaacgtgtatcctgatcacaactcccctgcattcattactgtgaaaatttttgaatcaaaagcaagtattattgttattatgatttgtattattattattgctgttactgttattacaccaactttcaggaggatgttttgtactcctgatggaaactattgccagacccacatgtagtcaacataaaccccacttttctatggcaattcactttttaagagtcatactttatttttttgcacagactatatgagtgatgcatgccacaggagctccacccctgagaagtttccttttcctagggacctggtggttaatggtttcctctgttacctgttggattgcctgctcaataagtattttgtgctgtgacctttgtggggaggggcaactgaccatatacttctctattctaggaatagatataaaagaaacattttagcctttttatatttcgatctctgattactccaggccattgcctttctgttgtgccacgtgattctgctaatcaagtccctgtaataacaggataaggactgttccattactgtggcttttgggagcccccagaaataatatcatttgtgtttaggacaatatataattataaaatctttctgctcctccctgtagcctctcttcaaaaactatcttttatttttttccagatttccttagtgataatatggaaattaatcaaggcactggaaaaagccatggtcctctgcccttttaattctgtgacacctttttaaaaatacaccagcatggaaattacctttattgtggaaaatcattggttgtgccacctcctaacaaagtcaaggtgctgatgtggagcagtctttgaaaatggcttaattgatttggccactttgcagtggtaacaatgtcatcattgaaaaagtctggcattttggtcatatttggcatccattcaataacagatatattgacacgacattctttttttttttttttttttttgagacggagtctcactctgtcgcccaggctggagtgcggtggcacgatctcagctcactgcaacctccgtctccgggattcacaccattctcctgcctcagcctcccgagtagctgggactacaggcacctgccacgacgcccagctaattttttgtatttttagtagagatggggtttcaccgtgttagccaggatggtctcgatctcctgacctcgtgatccgcccaccttggcctcccgaagtgctgggattacaggcgtgagccactgcgcccggccgacacgacattcttatggacccagagaatactgcaggatcctgataagaccttgagtgatatgtcactagtctaatctgttgcccttaaaatagcccttttttcaaacacaggaaattaagaaacaccacagacctctattatttagaatagattctatgtgtcagtatgtgatgtactcttttagtttgactgacttcaataccattcaaaaagatcctcaatggagttacagggtttataggggaaaaatacatgtttatgagacattgggcaattcaaatcaacatgtgttacataagcaagcaaagcaaaacaccagtggggtctctggaaagtaaaaggacagactacagtagaaggactgatcccagagtgcctgtacaaggcctaaatctggcaggcaaaagcatcccacactgtctgtcagcacccacatggcctttttgcctgccttctataacgggtaagtggacctacccttggagatagagaagaaaaattatcttctctgatattcggatgtaatggtcatctcagttcagccccctaggaaacatgttttattttccatggggaaaatatcagcgttaaagctctatcaaatcaaaacaactttgccaacatcttctctctgctacctttcaaaccaattaaatacctttctctgaatattttgtccattcagatccgaagacctttaaagactgtggttttatttttgtgtttacattcctttggtttgaataatttgcttgatttattgcatttttagtatttattttaagccagatgttttcatctttgattcatttttatgacattaatttgtagacacttagtaaagtcttatgagaagcaagtggatgaaattatctccaagtccactcagtagactggagtttttttaaaaatataaatttccaaaaagtttgcaatcaacagatggctaaaggttgccatctgaattattttataggattttaattgactccattgtatggaaaccaagtgtgaatgttaagatgaatttgccgtataccctttatcattcggtgtccttgtactcagactttcatgtccctgggtgacctcaatgtgttggtttgtctccatttagaaaggttgataatatattgaattgttcaagatcaggagttccagactgaccctccaggaaaaaaaaaatcgcaaagaacaaattctttttctgtgtaaaaaacactgatcctttgggaatggggcgggaaatgggagtaggacaacattaactttagctgttttagtttctgagatttcataacctcagtagacaccagcaaaattttcagtttctaactccaccaccaatctctcctcaatgaataagactttagcaatttatatagaatttgatcaggtaagagcgaaccacaattctcctgaaccctgctagagattaagtggtggttctcacttcctcaatgaaaacttgcactggggacagcgcttgccttggtcagaccttcccacatctacatactctcaaatacatgaccaggtgatcaagcaatggaaaaatttgcaccaccgtgtcccatgaaattgtttcaatgtttagtttagatattgctaacttgtgctattaaccttttgacaagcgtgtagtattgtttgttttgggtttctttttgatttataactatttagtagtccccagctagctaccagtacagattttaccccatgggtaggattctattgttaagccacataacaaagcacactaattctgacaacactgcaaatggaaaatacgaaccaaaaaaaagttacaccgataagttcaacaaactgtccatttttgatatttgcatgctcccctatggactggctgtggcaatgtaatgcctgtataatgttttcaaataaaaataaatgctttatgaaagcaccg

SEQ ID NO: 1941 - DNA, 4340 bp, Homo sapiens
aggggatgtggacattgtctgagaacaagtagggtgtggagggtggacaggtggctaggaccctccaggtgaggagcagggggccgatgtccctgccaagaagacacggaggcctcggcatctggccccaccttggagcccagaccacaggccacctctggccaggtccacacagcatggcctccagagctgggggctgagcctcccctccctccactacctgccatgggacccatgcagcttgctgcacctctctggacctcagtttcctcgcctgtggagtgggtgcctgtcgtctctccctctcagggctcgctgggacggtcacggctccacacagccatggtcattcggcttctcctccctcacagcttcctgcgggcctcccggccctccgccatgacccatgaggccccgaagctctccccgaaggtggaccggctctgcctcctaaaccgccccctgtccctgcaccttcagagcccccacagcagccccctggcccctgctgcagcccccagcgacccccggctccaggacctgaaggccagagaagcagaggcctgggaggagcccacagaactgctggggctgcccagtgccctggcgggcatgcaggaccttcgcctggagggggcactgcacctgctcctggcccagcagcagctgcgggctagggccagggcaggcagtgtcaggccaaggggccagcccacacccggggagatgctgccctccctaccagtcggctcagactctgagggccctgagaatgaggggaccagggcagctctggccgcagcaggcctgtctggagggcggcacacacagcctgcaggcccgggccgcgcccagaggacagaggctgcagccacgcaggactgtgccctagacaagcccctggacctctcggagtggggccgggcccggggccaggacactcccaagccggccggccagcatgggtcactcagccctgccgctgcccacactgccagccccgagccacccacccagtccggacccctgactcgcagtccccaggcactcagcaatggcaccaaggggaccagagtgccagagcaggaggaggcttccactcccatggacccctcacgcccacttccagggtcccagctcagcctgtcctctccaggcagtacagaagatgaagacacagggaggcctctgccacctccccacccacagccgcctccccacccacagccgcctgacctggacggccacccaggtacagtcagcacctggggtcagagtccagctgggaggtgttttccccacggagagagagggtggtggtcagtgcccaccaggagtgggtgtctccaggcccagctctgccctgccgatctgacggggcaaccccaggctccagggcttggctcttccacctgcagacaccggaggaagccgagggcctggcaggagcctctctaacaacactcagtgagggggaaaagcaccttagcaattagggctggcaagcaggctgtgagtgccccatcatgcagcatccaagccaggggcgggaaccccaactgatggggacactaggcctgggcccaaaccccagtcggcctcctgtcagccagtgccctggggcaggtcacttggccctccgtgcctcagtttccccatctgcagagttggctccacccatcctagtctggcaggctcgggagactcccggtgccaccagcctggcctgaccccacactctgcatccttcagagcccagcaaggctgaagtgctgagaccagagtccgacgaactggatgagacagacaccccaggcagcgaggtgggcctgagctcccaggcggaggccactacgagcacgaccggggaggggcctgagtgcatctgcacccaggagcacgggcagggtccaccacggaagaggaagcgggcctcggagcctggggacaaaggtacagctggcatggggcaggtgcagggaagggggcgaggggagccacagcacccacctctccccagtgccacctctcctcctggctgcctggagaatggcagcctcagaatgatggagccaaaaatgaacctcaaccctccccaaatgaaccccacagaggagggcgagggtggccggagtgagtccttcctgtgcagcctccgactgtgtaggttggtgtcaggtccttccaaatctgagcctcagtctcctcgcctgtaagggggctgacattagggatcgtaggagatttcggtgagagaaggagccaggggatggtcattgtccccaccatcatcctggaaggaagggtgtcctggtgcacaggataagccgctgccacaaggagcagatccccagggccccttgtccacctgcagacagggtcagcgcagaaggcacagccccgaggggcatgggggcacgtttgctcccctggggaattgcggacggctccagtgtttgccaagggcagtgtccttggacccagctcctcccagtaatgccggcaggagcctcggccctggtccgagggtatcgggacaacttttcacttcctgctctgggctcaatggcagctccagctggggtccaggagcccatgagagactttgaacacctaattgtatggccctggtttttctccgggcaaggcccgcaggcagcaggcggggtggtgctgccactgtgtgccattgttgccggcaggtggccatggcctgcgtctgcccggagcggcagtagagaccagcacggcccttatttgaggcacttcctgctgagtgggtggaaatggccccggggggtgcagtctgtgagccagcacacccttgtgctcctacctgagccgggaccagggacgctggcaggggctcctgagaaactgctgtggcgatcagtgagagcaggtccctgcccagcatgagcacagctcagcgccagagccagcatcctcgtgcctagtgccccagaagagtgggtgcagctgtggctgcctgtgagccttatgaccctgcccagcaggtaggatcatcactgtttggctggtgcagaaattgaggctgagaggggagaggtcacttgcccaaggtcacaggtctgggacttgtgtcaggattcaaacctgacccattcaactcagagcctgagcttgctgtgcctcagagatggcctaagcccagcatctcggcaggatccccgtccccggaccatcgcaggaaccaggcgcccctcccatgtggccctagcccgggggcaggcctgctgaggcccgcagccagtgtcaggccagccagtatggcctggctccctccaaggcaggaagggggccactggggtcagtgccgtgttcggggtcacacaatggggagagtgtccaccctccacccaattctcagggttcaccctcagatcgggctacccctgctctgggcaccggtttctgtaggaacaagggtggccagcaaacttccccaagcacccagctccccgtgcccagaggagacccaggaggccctaagtgagagccagtgttgcctcaaaggaaggcacacagctccggcctgacctccggccacttcccatagcctccaaaaagccatccagagggagaaggaaactgacagccactgaggggcccgggagcccaagggacgccgaggaccacagtccctcccccaacagcagcccctgggaggagacctagccagcctgcaccagggtccacagcgagcccggggcagccctccacctgcccaccagggcctggagagggcacaccatccaaccagcaggcagccctgcacagaaccctgggagaagacctagccagcctcagctgaacccacagtgagcccagggcagctctctgcctgctcaccacagcctggagagggcacaccacccaaccagcaggcaaccccgaagagccggtgacgggcacatcctggcccacttcaagaggggctggaggaccgagaggggtctcaggctggcgattcaccccgtctccacccacctgggaaatgctctgcggcccctcccacagcccagcacctgctccctgaggggtgtggggactggaggcgggatcactcaggctccagcccagccctacccctgctgtgcactgcagccgttcccaggcagtgcccacgctctgggaggcaacggaccactcggacccccacccctgcccgccaagctccaagcacaatcttggacgccccctcgtgggctgacagcaaacagatgtctggcagtgagggtggagggagacagtgggcggcagcaccctcgaagaccgggtcccctgagtgacggagaataaacacttgaagaaccgtg

SEQ ID NO: 1942 - DNA, 4493 bp, Homo sapiens
gcagaatccaggggacggttgctgagcgggcctgggacagcgggtcgcggcacctcccgcctgcgcgtgtctaatccgtctgtcgggtcccgaaagagctaagccgagcctgcgccggacgggtgggctggactgagagaattctctgagctggtgacaggtgccacaggcactggggatctcaccagaaaggaaccgacggagctaggggccagcgagatggcggacgaggccttagctgggctggatgagggagcccttcggaagctgctggaggtcacagcagatctggcagagcggcggcgcatccgctcagccatccgggaactgcagcggcaggagctggagtccatgaacgatgtggaggaattgactgcactgttgcgaagcgctggtgagtatgaggagcgcaagctgatccgagctgccatccgccgtgtacgggctcaggagattgaggctgccaccttggctgggaggttgtacagcgggcgtcccaacagtggctcaagagaggacagcaaggggctagcggcacacaggctggaacagtgtgaggtgccagagcgagaggaacaggaacagcaggcagaggtttcaaagccaacccccacccctgaaggcaccagccaggatgtgaccacagtgacactcctgctgcgagccccacctgggagcacatccagctcacctgcctcacccagcagttcacccacccctgcctctcctgagcctccattggagcctgccgaggcccagtgccttacagctgaggttccaggcagcccagagccaccccccagcccacccaagaccaccagccctgagcctcaggagtctccaacgctccccagcactgagggccaggtggtcaacaagcttctgtctggccccaaagagacccctgctgcccagagccccaccagaggcccctctgacaccaagagagcagacgtggctggaccccgaccctgccaacgctccctgtcggtgctcagcccccgccaaccagcccagaaccgagagtccaccccccttgccagcggaccttcctcattccagcgggctggctctgtgcgggatcgtgtccacaagttcacatctgattctcctatggctgctaggctccaggatggcacaccccaggctgccctaagtcccctgacccccgcaaggctcctgggcccctccctcaccagcaccacccctgcctcctcctccagcggctcctcctctcggggccccagtggtacctcctcccggttcagcaaggagcaacgaggagtagcccagcccctggcccagcttcgaagctgcccccaggaggagggccccagggggcggggcttggctgctaggccccttgaaaacagagcaggggggcctgtggcacgttcagaggagcctggtgccccgctgcccgtggccgtcggcactgccgagccagggggcagtatgaagaccacattcaccatcgagatcaaggacggccgtggccaggcctccacaggccgggtgctgctgcccacaggcaaccagagggcagaactgacactggggctgcgggcgcccccgaccctactcagcaccagtagtgggggcaagagcaccatcacccgtgtcaacagccctgggaccctggctcggctgggcagtgtcactcatgtcaccagcttcagccatgccccccccagtagccgaggaggctgcagcatcaagatggaaccagagccagcagagcctctcgctgcagcagtggaagcggccaatggggctgagcagacccgagtgaacaaagcaccagaagggcggagccctctgagcgctgaggagctgatgactattgaggatgaaggagtcttggacaagatgctggatcagagcacggactttgaagagcggaagctcatccgggctgcacttcgtgagctccgacaaaggaagagaggtagagagccagttgccctaccctagatccagctgccccattccccagctgctcccctcatactctggggtccatttgtggacaccccagcttaataactgccctacccagcttctccttctctagacccagcagttcccttggctattccctgctggatccagctgctccttccctagctccttctctcccgctggtgaccccagttattctccccaaccagcttctcttctccttcctagacccagatactccctcccgcagctactctctccttggatccagttgcctctcaaagtactgtcaacgactccttccctgaatccagatactccttctccctgctgctcctctctccctgaagtccattgatggccatcttagcctctgccccatccagcttcccttttcctggacacaactacttcctcccccagacagttcttccctggacacatctattcattcccttagattctgggttcaattgcttctcctctcaaacactctcaattactcctctgaatctagctgcttctgccagggcccactgatggccaccccagtctctatctctacccacctacttctattttaagcccagttaacccccttcactagcttctctcccagctactcttcccctggatcagattgcttctcagatcccatcaattgctcccttcctggatctaaatattcctgcctccagctgctcttctcctccaaccaaagacctgctgatggcccacccagctacttcctcactcagcttctccttccttggactcagctaccccctcactagatctagatacccctcctgacttagctactcatgcctatagaaaccctttttggatccatacccctttgagtttagctattccgtattctctagtttctgcctgagtccatcaaccccttcccacactccattccctgtcaagttatggctgtcccctcaccccagctgctcctagagaggcccttgttacctgtgtcattcatgtttctaacaagccaccctccaccccgtcttgtgtgccccatgcacctgtgcatctgtgctgtgtgggtgttggtggcccttttgcgcatgcatggggcatcccctgcccagaccagcgggacaaggagcgggaacggcggctgcaggaggcacggggccggccaggggaggggcgcggcaacacagccactgagaccaccacgaggcacagccagcgggcagctgatggctctgctgtcagcactgttaccaagactgagcggctcgtccactccaatgatggcacacggacggcccgcaccaccacagtggagtcgagtttcgtgaggcgctcggagagtaaggccacctggtgtcgccctgtgcctgcctgcctgtccgcccacctcctccggctcttccttgagctctctctccgtgtcttcaactgtgccgtcactttctcttctctgcctgcggctatcaccacccctccatacagcctcccatcccatctcctgatgtccagcccaggccctcacctggtgccccttccccttttttgcagatggcagtggcagcaccatgatgcaaaccaagaccttctcctcttcctcctcatccaagaagatgggcagcatcttcgaccgcgaggaccaggccagcccacgggccggcagcctggcggcgctcgagaaacggcaggccgagaagaagaaagagctgatgaaggcgcagagtctgcccaagacctcagcctcccaggcgcgcaaggccatgattgagaagctggagaaggagggcgcggccggcagccctggcggaccccgcgcagccgtgcagcgatccaccagcttcggggtccccaacgccaacagcatcaagcagatgctgctggactggtgtcgagccaagactcgcggctacgagcacgtcgacatccagaacttctcctccagctggagtgatgggatggccttctgtgccctggtgcacaacctcttccctgaggccttcgactatgggcagcttagccctcagaaccgacgccagaacttcgaggtggccttctcatctgcggagacccatgcggactgcccgcagctcctggatacagaggacatggtgcggcttcgagagcctgactggaagtgcgtgtacacgtacatccaggaattctaccgctgtctggtccagaaggggctggtaaaaaccaaaaagtcctaacccctgctcggggccccacggatgctggtggactgtgtgcccctggtggaggtggacgacatgatgatcatgggcaagaagcctgaccccaagtgtgtcttcacctatgtgcagtcgctctacaaccacctgcgacgccacgaactgcgcctgcgcggcaagaatgtctagcctgcccgcccgcatggccagccagtggcaagctgccgcccccactctccgggcaccgtctcctgcctgtgcgtccgccaccgctgccctgtctgttgcgacaccctcccccccacatacacacgcagcgttttgataaattattggttttcaacg

SEQ ID NO: 1943 - DNA, 4370 bp, Homo sapiens
atggcagagatagaataaaaacagaaaaatggcgacggtcacgttgtggcgagccttgctgcgtcattagataatcctcatgcaaatagcgggaagaacaaaggaaggggagcccgggacccccgggggcgcaggatccggcgggaggagtctaagaggaggaggcggcggtgccggaggaggaggaggagggagggagaagagaggaagaccggagtccccgcggcggcggcggtccggagagagggcgagccccgcgcggcgccggggaccgggcgctaccacgaggccgggacgctggagtctggggagcttcagtttcagcgactcacccgagaactggaagtggaaaggcagattgttgccagtcagctagaaagatgtaggcttggagcagaatcaccaagcatcgccagcaccagctcaactgagaagtcatttccttggagatcaacagacgtgccaaatactggtgtaagcaaacctagagtttctgacgctgtccagcccaacaactatctcatcaggacagagccagaacaaggaaccctctattcaccagaacagacatctctccatgaaagatcattgggtaactcaagaagttcaacacaaatgaattcttattccgacagtggataccaggaagcagggagtttccacaacagccagaacgtgagcaaggcagacaacagacagcagcattcattcataggatcaactaacaaccatgtggtgaggaattcaagagctgaaggacaaacactggttcagccatcagtagccaatcgggccatgagaagagttagttcagttccatctagagcacagtctccttcttatgttatcagcacaggcgtgtctccttcaagggggtctctgagaacttctctgggtagtggatttggctctccgtcagtgaccgacccccgacctctgaaccccagtgcatattcctccaccacattacctgctgcacgggcagcctctccgtactcacagagacccgcctccccaacagctatacggcggattgggtcagtcacctcccggcagacctccaatcccaacggaccaacccctcaataccaaaccaccgccagagtggggtccccactgaccctgacggatgcacagactcgagtagcttccccatcccaaggccaggtggggtcgtcgtcccccaaacgctcagggatgaccgccgtaccacagcatctgggaccttcactgcaaaggactgttcatgacatggagcaattcggacagcagcagtatgacatttatgagaggatggttccacccaggccagacagcctgacaggcttacggagttcctatgctagtcagcatagtcagcttgggcaagaccttcgttctgccgtgtctcccgacttgcacattactcctatatatgaggggaggacctattacagcccagtgtaccgcagcccaaaccatggaactgtggagctccaaggatcgcagacggcgttgtatcgcacaggttcagtaggtattggaaatctacaaaggacatccagccaacgaagtacccttacataccaaagaaataattatgctctgaacacaacagctacctacgcggagccctacaggcctatacaataccgagtgcaagagtgcaattataacaggcttcagcatgcagtgccggctgatgatggcaccacaagatccccatcaatagacagcattcagaaggaccccagggagtttgcctggcgtgatcctgagttgcctgaggtcattcacatgcttcagcaccagttcccatctgttcaggcaaatgcagcggcctacctgcagcacctgtgctttggtgacaacaaagtgaagatggaggtgtgtaggttagggggaatcaagcatctggttgaccttctggaccacagagttttggaagttcagaagaatgcttgtggtgcccttcgaaacctcgtttttggcaagtctacagatgaaaataaaatagcaatgaagaatgttggtgggatacctgccttgttgcgactgttgagaaaatctattgatgcagaagtaagggagcttgttacaggagttctttggaatttatcctcatgtgatgctgtaaaaatgacaatcattcgagatgctctctcaaccttaacaaacactgtgattgttccacattctggatggaataactcttcttttgatgatgatcataaaattaaatttcagacttcactagttctgcgtaacacgacaggttgcctaaggaacctcagctccgcgggggaagaagctcggaagcaaatgcggtcctgcgaggggctggtagactcactgttgtatgtgatccacacgtgtgtgaacacatccgattacgacagcaagacggtggagaactgcgtgtgcaccctgaggaacctgtcctatcggctggagctggaggtgccccaggcccggttactgggactgaacgaattggatgacttactaggaaaagagtctcccagcaaagactctgagccaagttgctgggggaagaagaagaaaaagaaaaagaggactccgcaagaagatcaatgggatggagttggtcctatcccaggactgtcgaagtcccccaaaggggttgagatgctgtggcacccatcggtggtaaaaccatatctgactcttctagcagaaagttccaacccagccaccttggaaggctctgcagggtctctccagaacctctctgctggcaactggaagtttgcagcatatatccgggcggccgtccgaaaagaaaaggggctccccatccttgtggagcttctgagaatggataacgatagagttgtttcttccgtggcaacagccttgaggaatatggcactagatgttcgcaacaaggagctcataggcaaatacgccatgcgagacctggtcaaccggctccccggcggcaatggccccagtgtcttgtctgatgagaccatggcagccatctgctgtgctctgcacgaggtcaccagcaaaaacatggagaacgcaaaagccctggccgactcaggaggcatagagaagctggtgaacataaccaaaggcaggggcgacggatcatctctgaaagtggtgaaggcagcagcccaggtcttgaatacattatggcaatatcgggacctccggagcatttataaaaaggatgggtggaatcagaaccattttattacacctgtgtcgacattggagcgagaccgattcaaatcacatccttccttgtctaccaccaaccaacagatgtcacccatcattcagtcaggctccagcaaaccttcaccaatttacatcagttcctattcctcaccagcaagagaacaaaatagacggctacagcatcaacagctgtattatagtcaagatgactccaacagaaagaactttgatgcatacagattgtatttgcagtctcctcatagctatgaagatccttattttgatgaccgagttcactttccagcttctactgattactcaacacagtatggactgaaatcgaccacaaattatgtagacttttattccactaaacgaccttcttatagagcagaacagtacccagggtccccagactcatgggtgtagcatcaagatgcccaacagaggaactctttctttctaaccttgttcagattgaggtgaaaagtccatcttgctgatttgatgattgaaatgtgaaagtgaagtggaaggaatgaatgaagtgtgttttttttttcttttttgaggaattatcagggaagtgaggaaatgtttgggagaggactttctaagctctatttaggtgttagatctaattacttatagattctgtagtctggtgaaggtgtgggtgacgtgatgagaggtttgagaaatgggtgaaatgaaatgggggatatgtaggtcaaatcaaattaaagatgatttttttaatgtgaataaagttatgttctgatagtttgtacagaaaaaataaaatggatgcccatgttttattgctattactaaatgtcaagattgtatgctattatgtcttgtaaatttcttttgttggtgtaaatatggaaatgccacattggttaagtgccatcatttgtaatgcaatgtgtcacttgaaaagagatttgaagaaactgacaacttcaaaaacaaatgagaagcccaaggaactgtgagcaattaaaagcaaaccgcgacaccctttgtctccaccacacatagtgtactttggaagcacaacgtccaggctggtaccgcagcgccatgcccattcctcgcctcgttcataggacacttcactgccattttctattcacataaaagaaaaataaatgtggaaatttcatccttgg

SEQ ID NO: 1944 - DNA, 3722 bp, Homo sapiens
tattgagcactgactgtataccctgcatgtgctaagtgctttacgtgcactctcgaatttaacattagaagtactcaccatgtcaggatttttccacttatgtatgtggaggttgcagtgagccaagattgcaccactgtactcaagtctgggcaacagagtgagaccctgtctcaaaaaaaaaaaaaaatttagagatgggggtgttgctatgttgcccaggttggactcgaactcttggactcaagcattcctcctgcctcagcctcctgaatagctgggactaaaggcgtatgccatcacacccagctggtaaaatcaactttcaataagcatgaagggtagtgatgaagagatcagggctagagccagatggcctgaattcaaatcctgctttctcctctctagctgtgtagtagctgtgggcaagttacttaaactctttgagcctctgatttctcacctgtccagggcgggtatgaacaggcccacctcacagtgttgcaaggattcagtgagttcgcatgaagtgattagaagtgattggggctgggtgcggtggctcacgcctgtgatcccagaactttgggaggctgaggcaggcagatcacttgaggccgggagttcgagaccagcctgaccaacatggagaaaccctgtctctactaaaaatgcaaaattagccggacgtggtagcacatgcctgtaatcccagctactcgggaggctgaggcaggagaatcgcttgaacctgggaagcggaggttgcggtgagccgagattgcgccattgcactccagcctgggcaacaagagcaaaaaaaaagaagtgattgggctgactgagtccacgccacatgaagggattagaagcgatgcatagtgaatgtgcagaaagtcctctcttaaggattagggtcaagaagaaaaagaaaggaaagggaaagtgctcaccatttgagacctgtctggaaattgctgtacttagtgtaaatttcttctcagcttcaacatctttgatcgtgattttatcaggaaaatactaataaagccactgttttgttcaacttctgatacttgctttttgaaaagataataatacctttgcctttttaaggattcagtgaaaatgctgttcttcaacttcattttgggatgcagtaggattcactgcttcacatgctccttgtgcacacatttgagtgcctactgtatgcaggcactacaggggagacagggtgaccaggacaagtcttccaacctcaagaagcttcaagtctattggggttgggatggagtagtggcaccacccaccccccccatcaccataagcaggagacacaagccaaggaggttctgtatgggaggcccactgacactgctggagctacttagtggggcacgctccaggaaagcttcccagaggaaggggcttcccatcccagaggtctaagaccttaaagccccaccaggtattagttcatatctccagcctctaacatattcctagagacagaattgttcaagtgggacttgtagaactcagctgtgccccagaacctccaagatgccccaggctggaaccacactggcctctcctctctgccaaaggccccttcaaggatgaggcccaaatccactaaaggactgtttaccacccaattatattccagaccagagaggcaagctggcagcctgcatgccaaacccaacaaaaatatgtgttttagtggcccatagagtatttctttgcactgaattatcaccaggacttaaatcaacattttatctatttaaccaacattatcaccaacatttgtcaccaggagagttcatgtaaaactgcacatttccagcctcttttgaaagcttcggtgaggcagcctcagcctaaatttgcccggggcagtgatgggggcactgaacaagactactcctcacagtccatcgggagccgtggagggtgctaagcagaggaggaacaggatccctctggctatgtgtggaaaatggactgcagggatgagggagcccagcggggaggtgaggtgactgcaaccatccaggcaagaaaggatggtggccagaccaggtgggagcagtgggcagtgggtttgattctcgcactgttttaaatgaagagacttcctgggggttatacgcaaggtggtaaggatgacgccaggtctcctgtcctaagccattggaaagatgggattgcctaaagctagggagggaaaccaccagtgggcagaggaaaccaggatcccatggtgagttcgagatgcccctcagacacccaggtgggagcgtcagggaggcagcctgttgggggtctggagttcagggctgaggtgggggctggagagagagatgaggagcggccagtgtagagatggtgcttagtgccccaggcctcggagtgggcacaactagggagaggacccggggccactcaacctggagaggtcaccttccgcctgggaagcccagcagggcacagggcagagcttctgcgctcctttcctggagggcccgctgacccctccggcgtcccttcccctctctcccagggccactgttcccagatgtgccacaacgtcttcatcgtggagtcggtgtgcgtgggctggttctccctggagttcctcctgcggctcattcaggcgcccagcaagttcgccttcctgcggagcccgctgacgctgatcgacctggtggccatcctgccctactacatcacgctgctggtggacggcgccgccgcgggccgtcgcaagcccggcgcgggcaacagctacctggacaaggtggggctggtgctgcgcgtgctgcaggcgctgcgcatcctgtacgtgatgcgcctggcgcgccactccctggggctgcagacgctggggctcacggcccgccgctgcacccgcgagttcgggctcctgctgctcttcctctgcgtggccatcgccctcttcgcgcccctgctctacgtcatcgagaacgagatggccgacagccccgagttcaccagcatccctgcctgctactggtgggctgtcatcaccatgacgacggtgggctatggcgacatggtccccaggagcaccccgggccaggtagtggccctgagcagcatactgagcggcatcctgctcatggccttcccagtcacctccatcttccacaccttctcccgctcctacctggagctcaagcaggagcaagagagggtgatgttccggagggcgcagttcctcatcaaaaccaagtcgcagctgagcgtgtcccaggacagtgacatcttgttcggaagtgcctcctcggacaccagagacaataactgagcgcggaggacacgcctgccctgcctgccatctgtggcccgaagccattgccatccactgcagacgcctggagagggacaggccgcttccgagtgcagtcctggcgcagcaccgactcccacgcacccggggaaggacaccctcactcccacaccccgggaagaacactagaacatcagcagaggggccctgcccctccgcctgcagccgtgaaaggaagctgggtcatcagcccagccccgcccaccccagcccctatgtgtgtttccctcaataaggagatgccttgttcttttcaccatgcaaataacatgcccagcaaaaacttgctttatgggtctgcctggagaaaaaaaaaaaaaatacaaacagcagaaacagc

SEQ ID NO: 1945 - DNA, 3806 bp, Homo sapiens
ctttctcatcttaggcctgcctgaaaacgttatagttccctttctggcaggcggtggtttcaatgagtacgtatactttgaattattataaatagttgagggacaggctgcctaaagtctaattggagagttaacctaatgtctgtgaaactaatgaacaaaacgagatagtgtagatcaggaatgtccagtcttttggcttccctgggccactttggaagaattgctttgggccacacataaaatacactgatactaatgatagctgatgagctaacaacaacaaaaagcaaaaaaaaaaaaactcataacattttaagaaagtttacaaatttgtgttgggctgcattcaaaactgtcctgggtcgcatacggcccatgagccatgggtggttggacaagcttggtgcagagcttaggcatttacaggtatatgagatttacctattcactatttccaatcaactcttgtggcctatcgtagtgtcatttaaactgtgtgtcccagcccacactttttgagtcccacatgctttgaggctgatgcagagaagcagcttctctagtgctagtaatgtgggtgacattctcctctgagctctactttgtaattctgtaagtccatgtttttcacattcacagaaaagagtaagtttgcttttcagtcattctttaattatatgcttcagggcaatatttaactgtgcaatctctcaaaacctttaatgtgccaatggcctctgaagctgctagtgtaatatgtggcctttcctacaccttccttcctatggaacacactttggaaagcactttcagttggatttgctctcagtaccatttttggggctgtgaagggggaagagtaagttacaagaactgatctaattagaggctttgaggggaagcaaatgctcatctagtggcctttcttctttgcaaaggtctaagtcaggtcatctgctaagagaaagactgggagtgaagtggacaggtggtttggaggagagaaggcggctccatacagttgtggagaattgggagtcctatgtgcattttgtgtttgtcagccatcctgagtgcattatgcaattttcccctttaatcctaacaaaaactgagcaaggcctatgccttaaccctttaaaaatctaattactacctttgttgaaactaagggtgcttgagtaattcaaaccctggtccatgtgattctgagatatgaaatctaacactgtgtctgacaccgtgtcctgttcattgtatgatgaatcccagcagaacccagcacttaattggcttttcagtgccctttagaactctctcccctgccctcaatagtggatgtatgagtacagatacacatgggagtgaggtgcactaggtaatgcaggcctgaaaattccatcacagaagaagaatctggattgctttgcctgcatcctgccactcacctgccaggctgtgccaaggctgcctcagctgcagacttggaacactcccctccaccactccattgaggctaaaactgaccctgttctattatgtcttccagccttatgaccctgtctctcccaccctaggctgtcctgctttcctcccttcaagcccttgttcagttgaagacaccaaggaggaaaaaggccgagtaacttgcccacattactcaggagcgagggagctagcaataacgtatgaaatatatgactcagggtttgaagtgaattctgctggacctgtaagttccataagggcacgattttccctgtctgggtcaatagatcagcagcaccaaacaatgccaggcgcattgcaaatgctcagtaacagtccaagaagggattcccttcttgctaggggccttgtttctgcttgtgttctgatgccatcctctctcctcagcactgccccccaggtgttgagtaccagctctccagcccaacaggcagaaaatgaagccaaagccagctcttccatcttaatcaacgaatcagagcctaccacaaacatccaaattcggcttgcagacggcgggaggctggtgcagaaatttaaccacagccacaggatcagcgacatccgactcttcatcgtggatgcccggccagccatggctgccaccagctttatcctcatgactactttcccgaacaaagagctggctgatgagagccagaccctgaaggaagccaacctgctcaatgctgtcatcgtgcagcggttaacataaccgcccagccagctgcctggcctccctcctgtgtttcccatggccagtggccatgccccatggggatcgcccctcctgcccccttgtgcatacccagcagtccagtgcaacgtctcctccatagctctgggttcttagatcttggttggacgtttgttttctccttagttgcatttcctgggtttttgtgatgatcaatggactttaatgaaaaaaaaaataaaaacaaccaaaaaaattgaaggaatatcaccagcatgttgtacggaaactctcccactgaagcaggctttaattgctttaaaattatatttatcttggggcctgtgggaggaaacttccttccatcttctctgcataaaaacttgtggcacacaatgcttattcactagtgtgtcccacccgccagccccacagatgactggaggaaggaggggaaatgtgtagaaagaggcttcgccaccacttgttcccacgagaatatatcacttgcccagataaaactgggcggcagccagagttccctgaagtgggaagtcagagctacatgcacacagtgtcttcagaaggtgaaaataaatatttccctgtgctccttttactcaacccctgggatatctaatcttgccaggtcttggccagttgagattctgttccacctgcctgcctggccctttcctccattaccatccagactgctcgcctcctggggattctcaggggctccattatggcttgatttactccacgtgcagaagtcttgagtggacctaggaggtaggtgggatattttttttcactaggatacagctcatgccaacccatcctaagtgagttcagaatcagggtatcttgccctaaaagataaacagtcaaaatgccaccgagctgttcactagtgatgtgtggcaaatcaaatcaactgttgaagaaggggtgagttttctgtgctacaagcacctgtcactgttggtacttgcaggaggcttctgctgggtatgttttggaagtgagtgtcactacttggctttgcttagcaggttctgcttcacacttgttctttgacctgctgacttgtgacttgcagaaacataggcagtagtcctagcctggtaaagaccctccaccacccctataagtttgattgctatgcaggtttgggagaggaggcctattgggctcttggatggaaccctttcccgtattaaacaaaccagagacagaatcagtgctgactcaggatctcctggtttggaatcgtaatgtgcctcaatcctctttccaagcaggcctcaccagtctctttctctttcctgcttcacccctgcaatgagccaagaaccaacactacatccacctagaactgcagaagggcttgtggtttcaaccaagacccatcctgagcaagggacttggcttggtgcttttgatcccaaagttcccacaccggcagtggcctgctggggcaatggcatctgtcacggtgttttctccagcaggtggagattatggaacctacatatgggtctggaaaaactgtacactgttgtcaccttgaccattaaaaaccagaatgagg

SEQ ID NO: 1946 - DNA, 3754 bp, Homo sapiens
tttagtcaatgctcacaagttattcaacataagagaattcacactggagagaaaccttatatctgcaatgagtgtggaaaatcatttggtgctcgtctatcccttatccagcatcagagaattcacactggagagaaaccttatggttgtagtgtgtgtgggaaaacctttagtcaaaagggacatcttattcagcatcagtgaattcacacaggagagaaaccctatgaatgtagtgagtgtggaaaagctttcagccagagttttaatcttattcaccatcaaagaacacacaatggtgagaagtcctatgaatgtaatgaatgtgataaagccttcagtttgctttcttcccttgttcaacatcagagaatacataatggagacaaaccctatgagtgtcacaaatgtgggaaggcctttagccaggggtcacaccttattcagcatcagaggagtcacattggtgagaaaccctatgagtgtaatgagtgtgggaaaacctttgggcagatatccaccctaattaagcatgagagaacacacaatggagagaagccctatgagtgcagtgactgtgggaaggccttcagccagagtgcacaccttatccaccatcaaagaattcacactggagagaatccctatgagtgcagtgaatgtgggaaggccttcaatgtttgttcctctctcattcagcatcacagaattcatactggtgagaaaccttatgaatgtagtgactgtggcaaggcgttcagtcagcattcacaatttatccaacatcagagaattcacactggagagaaaccctacatgtgcaatgagtgtgagaaatccttcagtgcatgcttatcccttatccaacacaagagaattcacactggagagaaaccctatgtatgtgccaaatgtggaaaatccttctgacaaagctctcaccttattcaacatcagagaattcacagtggggagcaacctcatacgtgtaatcgatgtgaaaaaaccttcagttagagaataactcttagtagtcatgagaaaatccatacaattcacattagagagcaagtctatgaatgtagtaagtgtggggaactctagcgcacagtcatctttcattcaacattgtacagttcacagtggagagtaactgattagtctataaattcttcacagttatacattatatgagagtcatactcgtgagaaatgagtcactttatggttttccttttggagattcagctcttaagggatttcactctcccagtgagctgctaactaaaggcaggctgctgaagtatatagcagcaatcccacaatagcgcaccttgcttcagattcagaggatgagcccccttcttgagccctgtagatatgtgaaacttaattatttagatgcatttcatggcaccagaccctaaggtacagttaggtatttcactggagaccacttactttgctttgctttgctttttttttttttttttttttgtatgatttatttcaacttcaaagaaagtagttgagatccttgcacttccaagtgtgatggaaccaggctagggttttctttgtttgtttgggcctcttcaaaacgtttttattctgttataaggaatatgataccttaagcttcaattcacagggaagagaaacatgattataagcaaaagtttgtcaaggaataaggtgagtctttgtgtagattaaaatagttgagaccttgctaaaaagtcagataacactgtaatccacctccaggtttccaagagttaagacgctgccagcaaggagcttgcagtcttgtagctggcccaatatatccaactaattcaaaatgggaaattgtacattttacttaaacaggatttggtagatgggtcttctagatatgttgtcatgaagaaaaatcaggaaaatgtccaagggtgggagcctgtggcttatggcttcacttacccatcacagatagctatgttacactgcaagaacagagttcatggcttttcctgaggtggctggaaaccttaatctcctgaagttaagtcaaaacttaaatgtcaattcacccagctctcttgcctgcaggctgatccagggacttagagcttgttacccagttacaacttcttctagagaagaacttttaagaaggaagcaaaaagaaattcagtttcccccaaggatctcttctttgaggttccatcaagagatgacaaaaggaggctgggcgcggtgtctcacacctgtaatcccagcactttgggaggctgaagtgggcagatcacgaggtcaagagatcaagaccatcctggccaacatggtgaaaccacatttctacaaaatgcaaaaattagctgggcatggtggtgcacgcctgtggtcccggctacttgggaggctgaggcgggagaattgcttgagcccaggaggcggaggtggcagtgagccgggattgcaccactgcattccagcatggccacaaagcaagactccaaaaaatatatatatatatgacaaaagggttaggaagcttttcctctgaggcccacgattacacaaccaaatcagaaaataatattttttttgttttaaacctgtttacataagatggaggtgtttacttaactaagaacctcggtatttactcaaatccggttttgggttttatggctaaaacatttctccagattaaccttatcagtttggaatatgtttttattttccattaaatatttcatccaaatcatactgaattttatttatcatggcttttaatgttctctattcaagtcaaatttctgtttcctaattacttggcttggtgatggcattaatattggttgggagctagatggtctctgctctatttgatgattggcatagagcaatcatacacttggtacttcctagcatttttttttgagacagtatcatgctgtatcatgttgcacagggtggagtgcagtggtgcagtcatggctcactgtaaccttggactcctgggctcaagtgattcccctgcctcagcttcatgagtagcagggactacagctgtgtaccaccacaccggcctctcctggcttcttaaccacttacattaaaattgagaggagaaaggcattttcagtttctttagttaataaaaagaagccatttctggaggagttttatgcctgtaccagcagaggttcagccttccaggaatctcatcatgatccatactgctgacacaggcctttgtcacctgaagcattcttaaaataaggagactgacattaaacaggacaattgtgaactccactttgtaagcatcatacatatcttacaactcattctgaagactcctttattcttgctcttcccagagagctactgtgtttagtcatgctcactgcactcacaagagaaaaagagtaagtggcatatttgcaggtgttgatggttacaagagcatttttactttttcctccatgtttgttctgcagcatttccattgatgcatgctattgtagacttcttaggttgaccttggccttgacctccaccactagctcatgacccaaaactgaagatgtgcatcagaaagggacagatttggtctttctgctgtaaaagatattctgccttagtgcctgctaatttgttgtgcatagtcctgtgctgccagtcttccccaccaattgttaaggttaatgtgtgttttatatgtgtattcacaaacattaaaatgtaatcagtggattcc

SEQ ID NO: 1947 - DNA, 4666 bp, Homo sapiens
atatctttcatatgattaatctgagaggagcttgactttctcttactggttctacactaccattagccatttgctggcagaatgcccacagaccacaggaaatctaaccatcccataaagaaaacgtatcagtgagtgtcttttagttagcccaaagaggggaaagatgaatggtctgagagcctccaacaagacctacacaaggatcgtgcatgccatgcagcccaagcacggcggcctccacccttgacttggctaatgtgcggtatgttacctttttctgctttccagtgcaatgggccttgcatcgggcctcacctagctgtgcaacacagacaagtcttctgccagacacgggatggcatcaccttaccatcagagcagtgcagtgctcttccgaggcctgtgagcacccagaactgctggtcagaggcctgcagtgtacactggagagtcagcctgtggaccctgtgcacagctacctgtggcaactacggcttccagtcccggcgtgtggagtgtgtgcatgcccgcaccaacaaggcagtgcctgagcacctgtgctcctgggggccccggcctgccaactggcagcgctgcaacatcaccccatgtgaaaacagtatgttccaaccccaaagaaccttctgcaaattccccatagagcatcgagtgcagagagcagtccctgggaccgaccctgagcatagggcatggggtcagcttccccagggattgtgagctggtggtggagttgagcattttcagtggggtgcatgggtgtatgcagagaggtgtatataagcatgacagggtatgccccaagggcttccacgatctccatcctggccctgagagagccaggtgctattggcccagtgctggaggaaatcagcctccagttcccctgcagtcagtctggctggtgcccacagggtctgactcatcaacaactctcaggggccaggctactaaacagaaaatgctgttaactctaaaggagcacagagtgcctcctgctcagccaaccagatctgcgcccatcacacctctgcttctcacccaacaaggaccagctgaccccctccctcccaaccccacaggcatcccctggaactgtccaggaccccccagccttggaatttgatactcacttcactccttcctcgtcatcccaataccatcatttgtattccagttgggaaggagtttatttttttcttcctctgaacccaaatcagaggtacttacccatgagaaaggtggcaaagcttgaggcaaagagtaggaagtaaaaaccaaatgtagctgtgcagttttctccccaactgggcctcactgagcaataaattcccaacactaaggcagacgccatgtaggcaaatagcccacttctttttacacgctgggggatggatgatctttgtactcgggtagtgttaacccatgtttgtgtcagtggctcaccatgctcagagagcgccaatattcaacgcacatagttaaaacttaccaaaccaagtcagcacaatatttaagaccatctagtctgtgccgacactgaactagaacgtcctggtgctgtgtttaaggcatgatgggtagaaggaagagagactggagggcacatgaaaataaagcttaacagagaaagtaggcccaagtgcctggggatgggggcacccgacgcaagtctcacttcacactcctgcaaagtcggggaggatgcagtgctgggaaccatcttgaggaggagagtcatttacttaaaataccaaaacccacgggaaaaggcaggtttgcctagggggagaggtgatcacctaggagatgaggtaatcccaagaagatagagaaaacaggcaccttcaggaagtagagggagctgcagaaaacaagcagacagcccagggaggggccccatcattcagccagacagctgcaggctggtgccacccctgctgttggcagccttggggagcaagtggctgagctctgtcaaagttaggctggagagcggtggccaaggcagaccccaggatgtaccccagtggctgaaacccccggctgcacctcacacaggctgcgttcattagtctctgtttcacatctcttttctgtctcctctcccgaccccgtcctcctttcccagtggagtgcagagacaccaccaggtactgcgagaaggtgaaacagctgaaactctgccaactcagccagtttaaatctcgctgctgtggaacttgtggcaaagcgtgaagatagggtgtggggaaaaactctaccctggccacacgaaggactcacgcaaccacctcggacagaacctaagctttcttcattttatttatttatttccccctccccactccacacacacccttccaacctcctccacctccaccttcaagcataaggacgtccgcgtgttttctctttcagttagctggaggacaggatgttgggaaaggaaaggacagatgtctaaaggaagttgcagagcaggccaggcagacagtgggggctcccttgaagagcttcctccctcccaaacctgggtctcaaagacctagaaagaggcaggcacagcccctgcggacagcagggagccagaaggtttgtagcctattggtgcaaacattggacaaattcctgtgtctttcctagaagcgcactatcacaaacacaggagtgttttgctcctttgtctcctcttccccatctatgtccctttagtcacagttaggacaaatggggaggggacaccatgctgaggcagaaactagcccagaactcactcagttcttctagtgggtgagtgcagagagagaagaactcagatcaccagtagggagaggtaaaaaagcaaacaaagcaggctctaaggcacacaacattgcagaaaatgaggaagggaggggagggaagggacagaagcaaaaaggagcctgtggtgttccccagtggggcagggtgagcaggggcttccaggctgcatgaggctcatggaccagctctgatcccatgcatgtgcgcatgctcagagccctgctgcccacaacagagcactgcgctgcgtgggagtccccacttcccaggctatcagagtcaacgtcctgcctgtgcagctgcagcaaagccagtgagaggtgggtctcgccatgcagtaaggccaccctggcacctctttatctaaatccgaagtcccctagccccgcactaactaactgctgctgtgggccagggccattttgagcatgaatggcccaggttttttgccctctaggacctttgctgctccaccgaagggccagggactatggttaacttatcaacatcaacccattaactagtcactgtgccagagagtatctgtcaggctgtcaggctgtcaggttgtagcaacctcttcattccagagctagcccagggaccggggtgggacaatgggtttatgcgtgtccacagtacaccctccctctcccagcctccaccccagggtctgcaggtcctccggcatgtagtatttatctagcaaggcggggtggtggaggcagcaccctggcaaagcagctcacacactgcagccacactcatcagctgtggtgaggcggctggagcaaagtcaaagtcatgcagcaaaatgaaaactctgggactcttcggcaaaatcctcattaagccgagcagctttggccaagtaatttttgcctccttccctcgcgtggcctgagtttaggagcaagggtggccagagtcccttacccacagataagcctcccctcatgaaatgccactcaccccgggctaccattgacatcagggctgcatttccagccagcctggaagtaaaatttgagaggaagacaatattaatctgtgtccccacctagtgagctgtggacaggtttaagttgggtctccttcttcttcaccacaaaaacaggctctaagaaatcatgttactaaaaaatcagtgtaaagtctgtttaaaataaaaaagaatgttttctatgtctgtatatcttttgtgaatatttattaggatttcttattaaaaaagtgcaatattaataattgtacattgtcatccagaaacaaaactattggggggactttattaactaacttcctgcagttgtgttcctgtaaactcagtagtgattattatatttttcctatttttaatagaacctggtgtttaactctggatccattcactgtacaggatgtgttgtaaaaactaacatgggatgctgaggcagtaagagggaattcatttgtggcataatagttatgcatggaatgataaagacagacaaattccatactactactaatgtggttaattatttctagttcgatagtgattgaaaatcagtggtcactatttacatttcctaaagagcaagcatcctccagctccatgttgggttggagcagttggcagtgggtctcagtgagctggcagaacctaggtttgggtgggaagcagaatgctcgttgcatgaaatgaatgtacatttaatgtttgttctgtgaattgcaactcagcagcaccacaagacaatgaaggctgctggctaatgtggaaggaggcactttctcctctaaaacacaaaactgtatttgtattttttgtacagataatacagcttatttattt

SEQ ID NO: 1948 - DNA, 3825 bp, Homo sapiens
gtgagcatatttggatagccagcacctgaacccagaaccacctgaccagctgtgagaagccgcctcatccctgcaggtggccactgtccaggggtgcgcatccacagcagcccctgggctgagggacttctgagctcatccggcggcccctgtgctcgctgtaacagcagtgatccacttggcctcattttcagctcgacgtgggatcatatgatgtgtcctggcgtgtctggcttcctctgtccatgtcaggctggtgctgtgcaaaaacaccggttttctccactgatggaagctcccagtagagtgaggagggcacctgtgaattgagaaactggttttacagttttaaggaaacgcaacagggcccagaaaagccaagatgagcatgaagagcccgaagaaagtggctgctcacatggcaggacgccccggcccccaagctgcagtgttgggccccggcccaggagggagcccagaggcagagccaccggtcaacaggccctcagcaggaatggacaaggctgcagggcagggggacactgttggctcaacagtgtcacacacaagtcagttgtaggggctgtggcgcctttaaggcaagcttctggaaggaagcaggagaatatcctgtatcctggggttggcagagatccaggctgcaagaaagccctggctgagaccctgttccctgttcaggggctgagccagctctgtgctggccatggtgctctcggtggcctctcctcagccttgcccaatcctgggcatctctggccaggggaccggctcaggtgacctcaccagggcctcacagatcgaagtctcctgccccaggacctgcagcactgtagcgtagcaactacattgccctgtgtctgaactcatttgaggcgggctagggcttttgaagtgttacttctttccctcccctcacagcggatcgtgtgaagaagggatttgacttccagtggccccaacccgataaaccgatgttcttctacgtgacccagggccaagaggagattgccagctcgggcacctcctacctgaacaggaccgaggctgcgaacgtggagaagatcaccacgaagttgctgaaggcaggcgccaagccggaccagattggcatcatcacgccctacgagggccagcgctcctacctggtgcagtacatgcagttcagcggctccctgcacaccaagctctaccaggaggtggagatcgccagtgtggacgcctttcagggacgcgagaaggacttcatcatcctgtcctgtgtgcgggccaacgagcaccaaggcattggctttttaaatgaccccaggcgtctgaacgtggccctgaccagagcaaggtatggcgtcatcattgtgggcaacccgaaggcactatcaaagcagccgctctggaaccacctgctgaactactataaggagcagaaggtgctggtggaggggccgctcaacaacctgcgtgagagcctcatgcagttcagcaagccacggaagctggtcaacactatcaacccgggagcccgcttcatgaccacagccatgtatgatgcccgggaggccatcatcccaggctccgtctatgatcggagcagccagggccggccttccagcatgtacttccagacccatgaccagattggcatgatcagtgccggccctagccacgtggctgccatgaacattcccatccccttcaacctggtcatgccacccatgccaccgcctggctattttggacaagccaacgggcctgctgcagggcgaggcaccccgaaaggcaagactggtcgtgggggacgccagaagaaccgctttgggcttcctggacccagccagactaacctccccaacagccaagccagccaggatgtggcgtcacagcccttctctcagggcgccctgacgcagggctacatctccatgagccagccttcccagatgagccagcccggcctctcccagccggagctgtcccaggacagttaccttggtgacgagtttaaatcacaaatcgacgtggcgctctcacaggactccacgtaccagggagagcgggcttaccagcatggcggggtgacggggctgtcccagtattaaaaggtggcggcggaagagctaagcaacgtggcttagtccatcagcatcttattctgggtaataaaaaataaaaataaacggatacctgttttccactgctaaaactgaagcaccactgtgtgagcaacaggaagggagagcgcacgagggagaggagccgaggccgagcgccccctgctggcccgcggcggcgaggagcagagggagcggaggaggggccggcccgcgggagccgcggccaccaggaggccccgctccgtcccatcggggctgcggccagggcggagggaggaagaccctcatctcagagtagccctttcctctgttcttttatttctttttctctttgattgaaaggggactacgtcttagcaggaaaaaaaacttcgcatttctgtgcccgagcaggctccttgcaaagacagcagcgtgcggggcagagccccgggagggcgcgtctgtccacgcctaccggacgcgccgaggtcgcgctgcctgtgttctccgagggccttcatttaaagaaaataagggtgttttgggtttttctctttgtttttttcaagattcttttaaaggagtactgaagaatactttcctaagtttgtctgtaaaatcttagcggtggacctgggagatttgagaagcttccagaaacagtttaaacaagccagcgctactggagaagaggagcaacacctgtgccgcggccggaggagttttgttgttggttttagcttccagtggcttctttctgcggggcatcaggctgctggggtagccgcccgccgagcctggaagctgctcgttctccgctggactcagaagccaagctgcttcccgcctagactcggcgcagggccccgcaccggtgaggaaggtgcttttggccccattgcgaggggccttggccaggactggccctgtggccaggaggcgagaaggtggctgttcccggattgacggctttttcccgggggcctttggaagatttggtggaaggacaagagggcctgtccctgtccccgtccccaggaggtaccgacagtccctgtgctggttaggcacggagcgctgcacaccgaaagcccaaattgggagctctgcctgccggcaactttgctgatggggtgattgctgcttctggggggtaaggaaacaagttacagaaattaccgcgttctgtgtgaagggactgagggtgtggtgtcattggcagagggtcattttaggagagctgccccagcccctcgaacgcctggcttggggtgtcattctgcctggcggccaggcctccagcttcccctgccccgggcctggggctgtcactggccctgatccgaacacctccagattccggcttctacatgggacagacgggacgcacaggccaccttccttctggcagggactcttatttattcccattgctctagggctttcggtttccccttcttccggtaggccgcgtagaggcatgcaccgggtaggtttccgcggtgaccccgcggcggcctgagggacgctccctgccccatcccggctgttgggctgggccgctttgcctctgctccgccctgtgctgtgttctccagctttgtagcagcagccttgacaaacccaggcgcactgtaccaaggcaatgtaacttttgattttcggtcaatttaagttcttttgtcaccaaatattaataaacagttttgacttc

SEQ ID NO: 1949 - DNA, 3802 bp, Homo sapiens
ggatcatggctgccgcgccgccgctacgggaccgcctgagctttctacaccgggtgagtgagggcggtccgcccgggccccggtcccacggctcctctcgagcgccgcattccccggactcgccccgggccggagccattgaccttgcgtctccgcgccgggtagctgctcctggccttccaagccggacccgccgagcgcaagggcgatgggcacagccagaccctgggggaacgaacaggcctcggccagcattcagtggcctccgacgggagggaaggagcggcggacccggtggacgtggagccgctgtgtccgtgctgctggcgcccaggtgggctggcagcccgccgtcctccctgacggtggcgtttcagaggactccggtcctggagaggcacccctgggttgcagaggacacagacgtctcgaagggacagagaaggacgcaccattgtaagcccctcttagtaaaccctctgagaagtagaggccggggcgagttcccaggtgtcgtcctgagcaaactgccctcttttgtcagccctgagctttcctgggctggacctcagagggggctgggtggtcccagggcgcgaccttgggctgccagaagccacgctagggttggtcaaggctctcagtgcaaggtttcgacatagtcgttctgtgctgcgttctgcagttgtcagctgtcacctgcaaacctcagcagctccccttagggcgtggtgggcaaacagtgtcagtgatgcgtgtccacagcctcgggaaacacttcaggtccacgttttcgtatgttgtcactagatctcggcccttccgaccgaaaggcttcggcacctcacgcggtgggtcccatgcttgtcctgttaaatactcttgaactctattctgtcctgatactgaataatgcaagaatgggtggttccagttttcatccctataaaccgtacatctttgtgccagtaagtaagcatgaaacaaataagtacgtctgcgctaagcgaacgtaaaacacacgacatcagtcggttctcggggagcgatggagctagtcacgctgagcggctgtcactctgccattccggcctctggggaggtggaacgattcatagtcccctgtgtggaaaaggggcttgcctgggccttgtttggctttgctagtcagtaggtaggtacaggagaggtaccttcaaatagccttacatgctggtaagtgcagggaggctgggggctgtgtcccttcttaacccaagtggcgcagctcctccgtggagaaccaccattgatttgcctcttctccgaggctgttcatccctgactgttgagagaggaccctgctgcagcctccctgtggccagtagcacagttctcatcccttcccagtcctctctccggccatgtcaacagtgagagctcccgattctcctgaaggggacgtccgatgatgatgtcccgtgtccgggctacctgtttgaagagattgctaaaatctcccacgagtctccgggcagcagccagtgcctgctggagtacctcctgagccgcctgcacagcagctccggccacgggaagctcaaggtgctgaagatcctgctctatctgtgcagccacggctcctccttcttcctgctcatcctcaaacgcaactctgccttcatccaggaagctgcagcttttgcagggcccccagatcctctgcacgggaacagcttgtaccagaaggttcgcgcggccgcgcaggacttggggagcaccctgttctcggacaccgtgttgccgctggctccctcccagcctctggggaccccgcctgccacaggcatgggctcccaggccaggccgcacagcaccctccagggtttcggctacagcaaggaacacggccacacgggctcggcaggcgaagccttcctctccaccatccagaaggccgcagaggtggtggccagcgccatgcgccccgggcccgagagtcccagtacccggaggctcctgccgcggggtgacacctaccagcctgccatgatgccttcagccagccacggtcccccaaccctggggaacctactccccggggccattccaggtccccgagctgtgaggcatcagcctgggcaggccggagggggctgggatgagctggacagcggccccagctctcagaattcctcccagaacagcgacctgagcagggtctcggactcgggcagtcattccggcagcgacagccattcaggggccagccgggagccgggtgacctggcagaaagggtcgaggtggtggccctgagtgactgtcagcaggagttgagcttggtgaggactgtgactcggggaccacgcgccttcctgagccgcgaggaggcacagcacttcatcaaagcgtgtggactgctcaactgtgaggccgtgctgcagctgctgacctgccacctgcgtgggaccagtgaatgcacgcagctgagggcgctgtgtgccatcgcctccctggggagcagcgacctcctcccccaggagcacatcctcctccgcacccggccgtggctgcaggagctcagcatgggcagcccgggacctgtgaccaacaaggccaccaagatcctgaggcactttgaggcctcctgtgggcagctgtcccctgcccggggcacctcagctgagcctggccccacagccgccctcccaggcccatctgacctgctgaccgacgctgtgcctctccctgggagccaggtcttcctgcagcctctgagttcaaccccggtctcgtcccggagccctgctccctcatctgggatgccgtccagccctgtgcccaccccacccccagatgcctcccccattccagcccccggagaccccagcgaggccgaggccagactggcagaaagcaggcggtggagacctgaacggatcccggggggcacggacagcccaaagagaggccccagcagctgtgcgtggagccgcgactccttgtttgctggcatggagctggtggcctgtccccgcctggtgggggctggggctgctgcgggagagtcctgtcctgatgctccccgcgccccccaaacatcgtcccagaggacagcagccaaagagcctcctggctcagagccgtcagctttcgcgttcctgaacgcctgacccgatggcctggccctggagtcttcagcttcagctgctgtctggggcggtctgtgcttcctgagcagcctcaaccgtagctgctacagtctccaggcagcttgacttgagaggacgaccctagggctacctcagtttcccccatctcctctgccagaggctctggctatttggacttgaatccctacgagggatggcaggtggcagggctttagagatgtcgatctcagggctctcagggggcagtccctgcctgtcttgccctcagacatgaggtttcttgtatgaatgcggaagcgactaccaggttccttatttcattttgatctcagctccctccttccccaggaggtcatgagcagcaacaagccactgctcccccgtcccatcggggtggggtaggtgctgaggctgggtttggtgcatgtgggttgagggtgtcttgtccgggctgccttgtgctgtctggcctgaggccatttcaagtctcagatccctacgtgatccttccctggctctcacctgctcctttaggctgtaattgcttcctacacacgaagcctctgattggagcctctggtccatctcagaaaaaccttccaagagcgctggggtttatgctttctgaataaacactactgtttacatg

SEQ ID NO: 1950 - DNA, 4319 bp, Homo sapiens
agtgcgcgccgagcgaagggcggcggcggtggcggcggcggctcgtgctcggccccggctgcgattgcgctcagctccaggttccctgcccgcggcggcgcgcccccagcgctccctgcaccccgcgccacccgcacccgcgctcggcccgctgcgggcggaggagcggccatgccgccgcggcgcagcatcgtggaggtgaaggtgctagacgtgcagaagcggcgggtgcccaacaagcattatgtctacatcatccgggtcacgtggtccagcggctccaccgaggccatttaccggcgctacagcaagttttttgacctccagatgcagatgttggacaaatttcccatggaaggaggacagaaggaccccaagcagcggatcatcccctttctgccaggtaagattctcttcagacgaagccacatccgggacgtggctgtcaaacgcctgataccaattgatgaatactgtaaggccctcatccagctgcccccctacatctctcagtgtgatgaggtgctgcagttctttgagacaagacctgaggacctgaatccccccaaagagtaagtttgtttgtgggcttccccagatggagccccacagccctccctcctgccagtccagccacccccaagtaaagcaaagtgcagccaaaagtgggtttcgtcggctgagcccctgtgagaccgcacttcacttagccttcagagttgctgtaagtgggtagcgatcgtccgtttgacaggtgaaggaaactggctgagtgctactcctgtcatcccatcatactctccacctgcccacagcacttatcgaggtgtgtcggaactgagcaggctgagcccgtgaggcaggggctgagccgtagattcatctagcttctgtccacagaggtggaggtgggtgtgctcgggaactgccagggatgtgaatgcgggagcaacccaaaccaacgaagaccccactgccggtgagcaacggggccgggatttcatcctgaccagccaggctccgaagctctccaaaatgcccaccacagccctgcctccctgtcacttctccctgcagtggacaggccacttgcccagacgcctgtcgctacacagccagcagccccagccacacagtgcacaccacataaaactctagcaccgcctgcttacccgcacttacgcaccaacactctggccggcccgggtgctttggggaaagcaggaagggatctggctaacggagaaatagcagtggggaaaagagatcagcccaaggtgctgggagtgtcctggggtcacaggagcaagagcgggcagagtttggggtccgtctgggctcattcgagaagggctgaaaagtaccagccaggctctgttccagaagtagatgctgctgctcttggcgctgcgttcgctggatgccccaggcagcagccgtaaccaaggctgagtttgctgagcagccagcgtggcgggcagtgtgccaagcactgtatgtgtatcaagagagaaagacacatgctcccttttggaaatgatctgctgggattgcaggcatgagccaccatgcccggcctataggagccactttcaagctgggtaagattgggcaggtttttctgccccttgcctcagtctcctcttatgtaagatgggcctgatgacacctccctcacagaattgcttggggaatcaaatgagaagatgtggagaaaatcacttggaactgctctacagaccatattgcccaagggcagaggaaggagcagacagcagccacgagggtagtattggcattggtgtgcattccttgggcccctggattcaatgatagccagattttcttctactttaactttggggagcatcttggaccacttagagaatccaagtttaactttggggagcatcatggaccacttagagattccaacaaaagctttcttccctcttcctggaagagcacctgcagtttcaggaggtccttatttgtgcagaatcctgtacatggacctgaggtgaagaagccccgcgctggcggcccttcccagtgttagtgctgggatgcctctgccctctccctggcaagggtggttgcagtggccccagcctctgagcaagcatcagaccaacttagacacacagaggggagagggccaggccaggggcagctgctgtgcttgggaggagtctggtcatcttcattcaagaaggaaggacactcggggacaaagggtgtgagccagccctcgagaggaggtgggaagtcccggaggctgcatggtggctttgtggtactctctggcttcctctctttggtggcagaggcagcctcactagcttgctggcttgggcttgtagaaatagcgcaggacaggagctctcagcccatgctgcatccagccaagggcactggcattgttcattcatcagccagatagggagggcctgctgactttcacagtggtgggaaaagctgtgtggacatgtgggtacacaggcacccatgcatacacaaatagaacatccactgaaaatacaaaacacagcccagactgtaccaaagaaagcaccaagtaacagctgagataagctagcatgcttatctcatatcttatatacgtccatcatgctggagtatatgtatctggttctgagagccttcctgaaaagaaagggaaggttcaaatctctttgtcccttcccagctgtgtgaccttggacaaatgacttgacttctctgagcttattttctcatcagtaaagcgggcgtcactaccctggctcacagcttggttgtgaggactaagcaagaccctgcccataaaggatggtgtctggcacagggcaggtgcttacctagtgatgccttcctgtctttaagccaggatttgaaaaggaaggaaggtggttgccaagggcccaagggatggttctggggccacagcaggcagtctcagctgggtcctggttgttggtttagggatggtgaacttgagggttatacccattggggttggtctgttggtcaggatcctgaaggtcaacccatgttagggcttgacatggactttgggcgtctttcctagccagctggtgctattggaggagggttttggccgccatgagtaggaaaacttgggaacaccccaagcatgtcacaccaagaagatgacccacctgcttgagcaaacgcatgctgtggctgcctgaacccaagagtcccctgccgcccccactcctctgctctggctgggacagtggaagcaggggtgcatggctcagcaggagcccgggtcttaagcccagaccacggctcaggtcgcaggcctggatggcaactctggcagctggtgctttctgtagaagcagcctggtggaaccttcgttagtgtgtcttgatgcagcagccaagaggggagcttcagtcactggatggtccaggtggtggtcaggagagtgggctccagccagacttcctgggttccagtcctgggcctggtacctcacctctctgggcgtcagtatcttcatctgcaaaatggagtaaccctcaaagggatgtatgcggacgcagtgaggcagtccaagtgtagctttctgaccaggacccagtgagtgccagtgaaggtgagctaggacattccactctgaccctcacccttctctgcatgggcgctgtgaaggtcaacctcagtgatgttatccctggagggaggacatcaccaccagcccagcccgacctggccagactctgctgcgcctcccagacatacaggaggactgtagcccctgctcttgggcttggctccctcactgctctctcccaggttgctctgaagcattattacatggtggttaaaaacccagacacattgagtagacatttctccaaagaaaatgcacaaatagccagtaagcatatgagaagatcctggcatcattatccatcaggaaatgcaaatccaagctacagtgaaatatcattagatccaattcacacccactagaatggctgtaatcaagaagatagataggccgggcatggtggctcatgcgtgtggtcccagcagtttgagaggccaaagcgggcaaatcacctgaggtcaggacttcgagaccagcctggccggcatggcggaaccccgtctctactaaaaatacaaaaagagccgggcgtggtggtgggcgtctgtggtcccggctacatgggaggctgaggcaggagaatcgtttgaacctgggaggcggaggttgcggtgagccaggatcgcgccactgcactccagcctgcgcaacagagtgagactccacctc

SEQ ID NO: 1951 - DNA, 3899 bp, Homo sapiens
agacgcaggctgcttctacaccggagctgtgctgcggcaccctggctcgctggcttctttcagcacctgtggaggtggcctgatgggatttatacagctcaatgaggacttcatatttattgagccactcaatgatacaatggccataacaggtcacccacaccgtgtatataggcagaaaaggtccatggaggaaaaggtcacagagaagtcagctcttcacagtcattactgtggtatcatttcagataaaggaagacctaggtctagaaaaatagcagaaagtggaagagggaaacgatattcatacaaattacctcaagaatacaacatagagactgtagtggttgcagacccagcaatggtttcctatcatggagcagatgcagccaggagattcattctaaccatcttaaatatggtaggcaaactttaaagtgcgcttggaattttttcaagaaaactctaaggaagacatgtgtatttaaccttttccaacacaagagtctgggtgtgcaggtcaatcttcgtgtgataaagcttattctgctccatgaaactccaccagaactatatattgggcatcatggagaaaaaatgctagagaaaatgtattattgctgaagacaatggcttgaatcttgcttttacaattgctcatgaaatgggtcacaacatgggcattaaccatgacaatgaccacccatcgtgtgctgatggtcttcatatcatgtctggtgaatggattaaaggacagaatcttggtgacgtttcatggtctcgatgtagcaaggaagatttggaaagatttctcaggtcaaaggccagtaactgcttgctacaaacaaatccgcagagtgtcaattctgtgatggttccctccaagctgccagggatgacatacactgctgatgaacaatgccagatcctttttgggccattggcttctttttgtcaggagatgcagcatgttatttgcacaggattatggtgcaaggtagaaggtgagaaagaatgcagaaccaagctagacccaccaatggatggaactgactgtgaccttggtaagtggtgtaaggctggagaatgtaccagcaggacctcagcacctgaacatctggccggagagtggagcctgtggagtccttgtagccgaacctgcagtgctgggatcagcagtcgagagcgcaaatgtcctgggctagattctgaagcaagggattgtaatggtcccagaaaacaatacagaatatgtgagaatccaccttgtcctgcaggtttgcctggattcagagactggcaatgtcaggcttatagtgttagaacttcctccccaaagcatatacttcagtggcaagctgtcctggatgaagaaaaaccatgtgccttgttttgctctcctgttggaaaagaacagcctattcttctatcagaaaaagtgatggatggaacttcttgtggctatcagggattagatatctgtgcaaatggcaggtgccagaaagttggctgtgatggtttattagggtctcttgcaagagaagatcattgtggtgtatgcaatggcaatggaaaatcatgcaagatcattaaaggggattttaatcacaccagaggagcaggttatgtagaagtgctggtgatacctgctggagcaagaagaatcaaagttgtggaggaaaagccggcacatagctatttagctctccgagatgctggcaaacagtctattaatagtgactggaagattgaacactctggagccttcaatttggctggaactaccgttcattatgtaagacgaggcctctgggagaagatctctgccaaaggtcctactacagcacctttacatcttctggtgctcctgtttcaggatcagaattatggtcttcactatgaataatccccagaccctcttccagaaaaccagagctctaaagcacctgagcccctcttcatgtggacacacacaagctgggaagattgcgatgccacttgtggaggaggaatattgccttaaaatctctgatgaaggctgatcatctcaggagaaaggaagacaacagtgtcctgcacaaaaatcatgagcaaaaatatcagcattgtggacaatgagaaatgcaaatacttaaccaagccagagccacagattcgaaggtgcaatgagcaaccatgtcaaacaaggtggatgatgacagaatggaccccttgttcacgaacttgtggaaaaggaatgcagagcagacaagtggcctgtacccaacaactgagcaatggaacactgattagagcccgagagagggactgcattgggcccaagcccgcctctgcccagcgctgtgagggccaggactgcatgaccgtgtgggaggcgggagtgtggtctgagtgttcagtcaagtgtggcaaaggcatacgtcatcggaccgttagatgtaccaacccaagaaagaagtgtgtcctctctaccagacccagggaggctgaagactgtgaggattattcaaaatgctatgtgtggcgaatgggtgactggtctaagtgctcaattacctgtggcaaaggaatgcagtcccgtgtaatccaatgcatgcataagatcacaggaagacatggaaatgaatgtttttcctcagaaaaacctgcagcatacaggccatgccatcttcaaccctgcaatgagaaaattaatgtaaataccataacatcacccagactggctgctctgactttcaagtgcctgggagatcagtggccagtgtactgccgagtgatacgtgaaaagaacctatgtcaggacatgcggtggtatcagcgctgctgtgaaacatgcagggacttctatgcccaaaagctgcagcagaagagttgacctctagcaggctggctggatcacagctcttggcaattacattatttataaacacacacactagcatgtttttcagaccaaatattatcagattacatataatttaatcaaattaatttatttttttgcctgccaaacatccaatgtggtgcttgttttggttacacaaacattttgatttatactatatggcttcataaataattttatatgaatgaattagttggatccagtaatataataaaaagaaaaaggaaaaaaatagatcattatacttaaaacaagttttcgttgtttgttagggctatctctaaggtgctactctctccccaccaataacattgaattatccagaatgtatactgacttagcataatagtttaggtgtatatgaagagaaactatttttgttttttggtgtcctgctgcagaattagcccattttctgtcacctgcaggagatgtgtaaacataatgaacctcatgctgttgaacaggtttttagagaatgtattatgaatttggttcagatttatagacatccataggaaaaattctgctgtaattataaccttattttgatatggaaaagaaaagtcaaaatagagactttgatcatgttcatgaacatgtacttgaacacaagtattgtaacaatgaaacactgtaatgatttacactgaatcacaattgcactgttgatatagtgtagagaaatcgttagaaatggtgacatcttacaaaaagtgtgtattattttaacatgttatcactagattttagctttttttaaatatttttaacaaagaaaacattgatccacccatttccctgtatctttttagcagatttattaaagagtatagtacttagcctcacgaatcataattagaaaatttactagtatttctcagccttttccctaggaacaaggaaaaacagaaagcatataatacggtggtcgtttcattgtgtttttcttccttttaaaaattaaaaagttttacaattatgtgaaacgttc

SEQ ID NO: 1952 - DNA, 4047 bp, Homo sapiens
aaagactaggcaacctccagccagtccctgggtcgggcggatcctcccagaggtggcacaatggagcgatctccaggagagggccccagccccagccccatggaccagccctctgctccctccgaccccactgaccagccccccgctgctcacgcaaagccagacccaggttctgggggccaacctgctggccctggcgcggcgggtgaggccctggcggtgctgacttcattcgggaggcggttgctggtgctgatacctgtgtatttggccggggcagtgggactcagcgtgggtttcgtgctcttcggcctcgccctctacctgggctggcgccgggtccgcgacgagaaagaacggagccttcgagcagcgaggcagctactggacgacgagaagcttctggctgaaactgtggctccggctgttaggggatctaacccccatctgcaaacatttacatttacacgagtggaactgggtgaaaagccattgcgcatcattggagtcaaggttcacccaggtcagagaaaagagcagatcctgctggacttgaacatcagctatgtaggtgatgtgcagattgatgtggaagtgaagaaatatttttgcaaagcaggagtcaagggcatgcagctacatggcgttttgcgggtgatactggagccactcattggggaccttcccttcgtgggggctgtgtcaatgttcttcatccgacgcccgaccctagacatcaactggacagggatgaccaacctgctggatatcccaggacttagctcactctctgacaccatgatcatggactccattgctgccttcctcgtgttgcccaaccgattactggtgccccttgtgcctgaccttcaagatgtggctcagttgcgttcccctctgcccaggggcattattcgaattcacctgctggctgctcgagggctgagttccaaggacaaatatgtgaagggcctgattgagggcaagtcagacccatatgcacttgtgcgtttgggtacccagacattctgcagtcgtgtcattgatgaagaactcaacccacagtggggagagacttatgaggtgatggtacacgaggtcccagggcaggagattgaagtggaggtgttcgacaaggatccagataaagatgactttctgggcagaatgaagctggatgtagggaaggtgttacaggctagcgttctggatgattggttccctctacaaggtgggcaaggccaagttcacttgaggctagaatggctgtcacttttgtcagatgcagagaaactggagcaggttctacagtggaattggggagtctcctctcgaccagatcccccgtcagctgccatcttagttgtctacctggatcgggcccaggatcttcctctgaagaaggggaacaaggaacccaaccctatggtacaactgtcaattcaggatgtgactcaggagagcaaggctgtctacagtaccaactgcccagtgtgggaggaagcgttccggttcttcctacaagaccctcaaagccaggagctcgatgtgcaagtgaaggatgattccagggccctgactttaggagcactgacgctgcctctggcccgcctgctgactgccccagaactcatcctggaccagtggttccagctcagcagctctggtccaaactccagactctatatgaaactagtcatgaggatcctgtacttggattcatcagaaatatgcttccccacggtgcctggttgtcctggtgcttgggacgtggacagtgagaatccccagagaggcagcagtgtggatgccccacctcgaccctgtcacacgactcctgatagccagtttgggactgagcatgtgcttcggatccacgtattagaggcccaggacctgattgccaaagaccgtttcttggggggactggtgaagggcaagtcagacccctatgtcaaactaaagttggcaggacgaagcttccggagccatgttgttcgggaagatctcaatccccgctggaatgaggtttttgaggtgatcgtcacatcagttccaggccaagagctagaggttgaagtctttgacaaggacttggacaaggatgattttctgggcaggtgtaaagtgcgtctcaccacagtcttaaacagtggcttccttgatgagtggctgaccctggaggatgtcccatctggccgcctgcacttgcgcctggagcgtctcaccccccgtcccactgctgctgagttagaggaggtgctgcaggtgaatagtttgatccagactcagaagagtgcggagctggctgcggccctgctatccatctatatggagcgggcagaggacctcccgctgcgaaaaggcaccaagcacctcagcccttatgctactctcactgtgggagatagttctcataaaaccaagactatttcgcaaacttcagcccctgtctgggatgagagtgcctcctttctcatcaggaaaccacacactgagagcctagagttgcaggttcggggtgagggcactggcgtgctgggctcattatccctgcccctctcagagctcctcgtggctgaccagctctgcttggaccgctggtttacactcagcagtggtcaggggcaggtgctactgagagcacagctagggatcctggtgtcccagcactcgggagtggaagctcatagccacagctacagccacagctcctcatcgctgagtgaagaaccagagctctcggggggaccccctcacatcacctcctcagccccagagctccggcagcgcctaacacatgttgacagtccccttgaggctccagccgggcctctgggccaggtgaaactgactctgtggtactacagtgaagaacgaaagctggtcagcattgttcatggttgccggtcccttcgacagaatggacgtgatcctcctgatccctatgtgtcactgttgctactgccagacaagaaccgaggcaccaagaggaggacctcacagaagaagaggaccctgagtcctgaatttaatgaacggtttgagtgggaactccccctggatgaggcccagagacgaaagctggatgtctctgtcaagtctaattcctccttcatgtcaagagagcgtgagctgctggggaaggtgcagctggacctagctgagacagacctttcccagggtgtagcccggtggtatgacctgatggacaacaaggacaagggcagctcctaggagctggcgagtcccagcctgactgctctgtcttcctgccttcgtctcgctccatcaccgcctcaatgtgatgagcctaaagctagggtccaagggcagagcctgtgcccttcagccctttcacctaacaggcccatattcgggcctttgcctgaccaaagagaagaaccgtatgttccctttactgcacggcctttatccttctgggcccctggggcggggacctgagctggctgtttcctgctttgcctgcacattgttctcccttcctcccaactcctcagggccttctgtatctgtgcctggccagtggcagcactagcagtggtattagcttatgccaaatacagctttggaaggatctttttttctttaactagatggtcaccttcttccctaccacacatgggtgggaaggtggacaggctaacctctccagctgtgagcctcttagactactgcatgtagcaaatgttcagcagctcaggcccccatgtccagttctgtccccactgtcctcaaccctgtcctgaaaattctactgctttgatggctggggccagtctcttgtcactttggaaactgaggacgcgtggattctactcaagcctccaagtagtggcatatcagtcttggagctcctagctggtgatacggagagggctttggaggacttgggacagcagggccaattttttgcccaagtgcctaggctgctaactcactgactagaacttaatctggtactttacagttttgcaccaactctgccaagccactggatcttacattaaacatcatactcaaacc

SEQ ID NO: 1953 - DNA, 3507 bp, Homo sapiens
aagcctgtgggagcccgtggcctttaaagtgccgttcagccttttcctccaggggtgctttgtaaacacggctgtgctcagggctcgcgggtgaccgaaaggatcatgaactagtgacctggaaagggtactagatggaaacttgagaaaggactgcttattgataacagctaaggtattcctggaagcagagtaaataaagctcatggcccaccagctagaaagtattcttgccatgagaaaaagaatgtgataagttattcaacttatgaaattcaagttacatgtgaattctgccaggcaatacaaggacctgtggaatatgagtgatgacaaaccctttctatgtactgcgcctggatgtggccagcgttttaccaacgaggatcatttggctgatcagaccccaacaccaacaagattcttgaaaaactgtgaagaagtgggtttgtttaatgagttggcgagtccatttgagaatgaattcaagaaagcttcagaagatgacattaaaaaaatgcctctagatttatcccctcttgcaacacctatcataagaagcaaaattgaggagccttctgttgtagaaacaactcaccaggatagtcctttacctcacccagagtctactaccagtgatgagaaggaagtaccattggcacaaactgcacagcccacatcagctattgttcgtccagcatcattacaggttcccaatgtgctgcttacaagttctgactcaagtgtaattattcagcaggcagtaccttcaccaacctcaagtactgtaatcacccaggcaccatcctctaacaggccaattgtccctgtaccaggcccatttcctcttctgttacatcttcctaatggacaaaccatgcctgttgctattcctgcatcaattacaagttctaatgtgcatgttccagctgcagtcccactcgttcgaccagtcaccatggtgcctagtgttccaggaatcccaggtccttcctctccccaaccagtacagtcagaagcaaaaatgagattaaaagctgctttgacccagcaacatcctccagttaccaatggtgatactgtcaaaggtcatggtagcggattggttaggactcagtcagaggaatctcgaccgcagtcattacaacagccagccacatccactacagaaactccggcttctccagctcacacaactccacagacccaaagtacaagtggtcgtcggagaagagcagctaacgaagatcctgatgaaaaaaggagaaagtttttagagcgaaatagagcagcagcttcaagatgccgacaaaaaaggaaagtctgggttcagtctttagagaagaaagctgaagacttgagttcattaaatggtcagctgcagagtgaagtcaccctgctgagaaatgaagtggcacagctgaaacagcttcttctggctcataaagattgccctgtaaccgccatgcagaagaaatctggctatcatactgctgataaagatgatagttcagaagacatttcagtgccgagtagtccacatacagaagctatacagcatagttcggtcagcacatccaatggagtcagttcaacctccaaggcagaagctgtagccacttcagtcctcacccagatggcggaccagagtacagagcctgctctttcacagatcgttatggctccttcctcccagtcacagccctcaggaagttgattaaaaacctgcagtacaacagttttagatactcattagtgacttcaaagggaaatcaaggaaagaccagtttccatttatgcgaaatctgtggttgtaaattttttttttttttacttgaaattaaatttggctctaaagttggtgtagcagcagttgatcagactgaaaaacggtttttagtctctggaaaaagactgattttgctttttttataaatattattagatttattaatttttctgtgctcaatgtgtaaattgtattataattcattgtgatttatttcacttttaatttgctggtgttttaataaatgggggtgttactgaatctttcttcccacttccatttcttttgaccaccccttaaccctcaactgtgacggtagtagtattatcatttataccaaagttttgcatagtccctgttgactttgtaatgttaacggagtcataaaagcactaggcaagagaaagacagaaatttgcttttaatctttttgccttttattttgcacattatgcaaaaggaaaaacattaaagaacacttttttttaagtgagtgaaaacatggtaaagacatacagtgcttttatgcacattgttaagctaaatcaaggtcatttataatcattttccttttttatttaagattttaagtaaacaaattttagaattttcagcatttcaaaaatgattttatttttcaagtcttaaattcaatattttacacctatgttttgaggctaaaaatatgaaattatataatgtatgatacagggttatcaaatatctaataatttttgaaattagctcttgtttttggtttttttgttgttgtttttacagatttcaggttacaaactgcaaagtttatgcataattaagtatggtatggttgccagaaaactttgtaaaatagttatgagtcctacccagtagcaacttctggcattcaagcaggattccactatgtaaatatctgtaatgcatttataataagttgtgtagtttgtcctgcatccatactacactatttgctaaagtctcagtgccatctcctaatgagactgacattttaaaagtctgtatggaatatccttgataattcaaggaaatatccctcctgcctaagttccaaactgggaaacattcaaattatataaatgacatttcaggactttaagtatgaagataatgggaattttattgttttgctttttaaaatgagagcatttttatttgataattttttttaaatttttaatttttaactaatttcattattttaaagtaatcagtttttcaaatcatgattttgatatcattattctaaggagttatctcaaaggcacaaaatatgaattctgcaagaaggctattttttattgtagtttgaatgggttaggaaaagcctcaatttttcactcttaagtccttcagtacatttttctttcatcttattacttatgcaagttaaggttctttggtaacagaattcttgcaactgtaaaataaaactacatagatgtaagaagtcatgtaaacggttaacaagcttaccaaggttagcaaaactttcattgtaaatcagtctgtactgagcaaataaaaatcattattagttgtataaacacaaattccattttgactttcaggatgtcatactacttctgtacctagcattttcagtccttatatttgcaatgttacacaaactgtactattttcttttatgtgcagtttgcatgagtaaaccatcagagaataaattctatctttaaatt

SEQ ID NO: 1954 - DNA, 3574 bp, Homo sapiens
gggacatatatgtatgttttatatatgtgacatatatgtatgttttatatatataacatatatgtatgttttatatatataacatatatgtatgttttatatatataacatatatgtatgttttatatatatatatgtatataaagaaaatcacaaacctagtcactctactgatgcaaatgatttgggggtgtcttcctagctttacaataagaggagggacctctgctgcaccctctgtctcagtttcagggcaacatctggtctctttggaagcagcttccatgcatgacataagcaaacagggccccgactttcttcctgaaggccacttttcacgcttttcaaactggtttctgtacgtctgaaacaaaccctctgcatggaggcctgcaatgtgcatagattgttcataactcagaacgttgactttaatcaattgctaaatgtgttaccttttgtttgaagaaaaataggatgcaagtgtctttgtatattcaaataaaagctaatgaatgaaaattttccaataacataaatttcaactccacaatacaagtctcaatgaggctaaccactttctctcattgtttcttttatcgtggtatgcgctagtgcaggatactgacttttttttcagattggtcttagcacaattactaaaataatttcatttttctacttgaaatgacagatttagcaggattaacatctcataagggatacctccataaccaaaactggatagattttggagttttcacactgacctcaaggagcaatgcattccttttgctattacttttgaagacatgagacatctatatctgatttttttttttttttttttgagatggagtctcgctctgtcaccaggctggagtgcagtggctcaatctcaactcactgcaacctccgcctcccgggttcaggcgattctcctgcctcagcctcccaagtggctgggactacaggcgcccaccaccactcctggctaatttttgtatttttagtagagacggggtttcactatgttgaccaggttggtcttgaattccttacctcgtgatccacctgcctcggcctcccaaagtgctgggattacaggcgtgagccaccacacctggcctatacctgatatttcttatgctttgattacaaattcaactgaggagacagcagatgctgaaagtctgaagaagtagaagggacatgtcaaaactcagcaaattatatcctgttttgttcattcaggctgctataacaaaaataccataccctggatgcttataaacaacagaaatgtatgtctcccagtccccgaagctaggatgtccaagatcaagtcaccagcacatgcagcatctgttgacaacctactacttcttgtttcataggtgtctctcttttctctgtgtcctcacatgctgcaaagggcaagggatctctctgggtcttttataaggacgctaaattccattcctgctggcagagccctcatgacctaatgacatcaacaacggcctcacatcttaatagcatcaccttgggagttaggtttccacatatgaattgtaggaggacacaaacattcagtttatagcatatgcataagcaactaaagagcaaaaagaagagactatgggcatctcctagataggaaattgaaattcagaaagcataagtaactcagtcaggtgtgagaaatggtggagcctccttcctattatactctgtaggaacaatttaaggttcctgtatgtgtaattgtcgggatagcagctctaaatgttagatcattcttaccagataatataaaaatgcaacatgattcaatctggtcaattttgttctttccacctaaaataattcttcattaaaatatagttttaatttactgaattaattctttaagctgaatataaacacagttgcaatgtgaaggaaaagtagaaagcttacataatatatgtaatgtggactgtcaccaatcacccctaactgtaaatacatgctacagatgttttcttacttgtctgagttggagccctgaactgtacccaggtgtgtccactctgaaaagctgtacttctgggctagcacagaaacaaacagtaatcagaaggggttactaacctatttctcaccttggttcttctgaataaactcagaatttaatctcaccatcaatatattgatgcagatctcggctcactgcaacctccccctgccaggttcaagtgattctcccgccttagcctcctgagtagctgggattacaggtgcctgccaccatgcccagataatttttgtatttttagtagagatggggtttcgccatgttagccaggctggtctcaaactcctaatctcagctgatccacctgccctggtctcccgcagtgctgggattacaggcatgagccaccacaccccgcctccaggagctactctttatagtcttctctcttctgtcttgtttctcctgtggttctgttttgaggctttcacactttactcaggatgtacacttatcacagctacttttggaaggattgctgctgatgtaatttattactctctttacctcgatttttaataaagaaagctctttgaaaatgtttttcttttactctaactatattctcaggagtttattactacttgctccaaatctgggttgtttcccttttgttcactttggacttttgtctaaagacctctgttagtagatgaatattgcctttgaacaaataaaaatatttgaacacagttttacattgatctattttaatgaaccaaagcaagttttgcatgagtgtgcagtaatagatttgcaatgagacttttaaagtcagttttaaaatctgcacttttgaagattaatttcttgtgccatgccaatgaaacactgtcccattgccaactccacaatgatgtttagctttactgaacttcctcctgtgaaactgatcttcaagccaagttaaacttgtttccttcatagaaatagttatagggacaaatgactttaagcaataggatggatccagccttcaaggtgacatgtattcaccttagctccaaagccaattaagtaaaccaaaggatccttttttttgaactatcctaagccattccaaaattatttgttttatctcatggaaaatgttttgaatctcaagtcccttaaaacatactgcagttattaacaaagtcaaggagttaaaaggcagtctgcctgcagaatctgctgaacaatgtgtcaaccttagggatatagttaaaaactggaatggatctggccagtccctttggtctcacagaaattcctaaaccacactgtactttgaagcaattttccaggcacccctctttgcaagttctgcattgcttcagggtcctgacttctaaggtttattttaagatcttctaaaaagggattagaaatcagaggatgaagggtgggaggacggagagaatactaggcttaatagctggatggtgaaataatctgtacgacaaacccccatgacacctgtgtaataaacctgcacatgtacccatgaacttc

SEQ ID NO: 1955 - DNA, 3834 bp, Homo sapiens
ctgagtccccaggcgctagctgactggggtggttgggaccgttagctcggcaggctggcaggctccggggcgctactccattggcggccgggatggagactatgcgagcgcagcggctgcagcctggtgtgggcaccagcgggaggggcactctccgagcgctgcggcccggagtgactggggccgcggccgccaccgccaagcacacgcagggctatggccgagtgaatgtggtggaggcacttcaggaattctggcagatgaagcagtcccgtggtgctgacttaaagaatggggctctagtggtttatgagatggttccctccaacagccctccttatgtctgctatgtcaccctgcctgggggaagctgctttgggagtttccagttttgccccacaaaagctgaggcccggaggagtgctgcaaagattgcgctaatgaattctgtgtttaatgaacatccttcccgaagaatcactgatgagttcatcgagaagagtgtctctgaggccctggcatcttttaatggcaacagggaggaagctgacaacccaaatacagggattggtgccttccgattcatgctggaatccaacaagggcaaatcaatgttggagttccaggagctaatgacagtttttcaactgctacactggaatggcagccttaaggccatgagggaacgacaatgctctcggcaggaggtgttggctcattattcgcaccgggccctggatgatgatattcgccaccaaatggccttggactgggtgagccgggagcagagtgtgccgggggcactgtctagagagctggcctctactgagcgggagctggatgaagcccgactggcaggcaaggagctgcgcttccacaaggagaagaaagatattcttgtgctggctgctgggcagttgggcaatatgcattcttccaactgctaggcatccacccacataactccccaggctttccacagcctttttttatgtctcctttctaagatttaggatgattttttgtacatactttctcatttttatactttaaaaaatatatatgtgtataaattctacacctagattcctatttgctaagagatcccttttcttactaccagtttttggatgtagttttatttgaaacatcttcagtccactttacaacaaagagcagcttgtctttgcagctttgttagctcttaaacttccagattaactgtgtagccatttcagtagcactaaaagattaactctagtgttcatgtgtccttcttttcaaatatcaggtaacttgaataaggattatgtgccccacccttactctcattcctgcttcctcttggactcaaacagggtatgagtatgaagattttgcctttagttcctgaactgaacctgcttgctatccctttcctccccaccactaccttattccttctctgcctccaaattgccactttgttttgaggcttccttccctaccttattattctgaaggaagtagagatcttgcttctgaaacccctcctaagaaactgcccagggacaagataaattacaaacaattcatgggagtttactacctaagttgcttctagggcatatgtataccatactagtagtctagatttctggatatactctacagtagatgggggttatggttgaaactgattctctttcagtattccctctaaacatctcccctactcccccagcttagttaaaccctgcgtttggaccttcctgcctgcagctattagtagaaagtaaaacatatttccatatttcccttcacctaacattttattttttggaagcgttatcagtcctatttggttagtgagaaccatgttccccttattcccgctaagttgctgctgtttactaccttagattctcatttgttttctctttctttcctctccttccacattaattattagaacataagttgatcaggaaaattaaatgagactttagtattttggcacttcctaattgacaccttgggagactgcaggaagggaaagagaatcaatgatcagttatttgtgtgtgtgtgtggtttttttttttttttggaagacagagtctcacacttttgcccaggctggagtgcagtggcgtgatctcggctcactgcaacctctgcctccagggttcaagcgattctcttgcctcagcttcccgagtagctgggattacaggcacacgccacaacgcctggctaatttttatatttttagtagagacagggtttcaccatgttggccaggctgttcttgaactcctgacataaggtaatccacccgcctcagcctcccaaagtgctgggattacaggcgtgaggcactgagcctggcctatttgtggtttttttttggttttgtttttgtttttgtttttgagacggagtcttgctctgtcgcccaggctagagtgcagtggcgcgatctcggctcactgcaacctccgcctcccagattcacaccattctcctgcctcagcctcccgagtagctgggattacaggtgcccaccaccacgcccagctaattttttgtatttttagtagagacggggtttcaccatgttagccaggacggtctccatctcctgacctcgtgatccacctgcctcggcctcccaaactatttgtgtgtttttttttttttttgagacggagtctcgctctgtcgcccaggctggagtgcagtggcgctatctcggctcactgcaagctccgcctcccgggttcacgccactctcctgcctcagcctccttagtagctgggactacaggcgcccgccaccatgcctggctaatttttttgtatttttagtagagacggggtttcaccgtgtttgacaggatggtctcgatttcctgacttcgtgatccgcccgcctcggcctcccaaagtgctgggattacaggcgtgagccaccgcgcccggcactatttgtgtttttaacaccattctcccccacttctctcctgggtgacataagagagaaataacctgtagtacagcagctaaagtattctcctttcagagaatttttttggaggtctctaatatatatttcccccttgtctctgtgatctcttatttatactatattattgtcccatgtactttctaaactgagcttggaacatttagtattcctgcaattggacttcccacttaacaattatacagactttgcttttagaaatagattaggttccaaacagaaagttcaagtgtaacaacaacaataaaaatagattatgaaacaggctataattggctcttttggatttgataggggcaagatgaaaggcaactttcttgcttttgaaatcatgttgggtaagaggtaaggaatccagctacaattttattagtgcttgaaacgggcttccttgaattctccaggccctatcattttttttttcttactaatcagaagagagctggggtagaagccccatgtttgtattccatgaaacacgtcgggttggagtaaaggcaaaaacagctagacacaccaggtgtgtctgtttgacatttataagctggcactcatcaacactcctgtttctcctttctctgggacgtgtggattaaggggtgtgagttgtgggaagaattgccctcgtacctcctggatttattatttttctcaaataccaaccagtaagatcccaaataacttgagaaaaattgtttcctgatctgtccacttctggtgtcaaagattttactcatcttcttagtacattctatgtattttatatgtataattttatacaattaaaaatagatttttgtctagtg

SEQ ID NO: 1956 - DNA, 3794 bp, Homo sapiens
tttgaaaagcaggttaacttacagaggtattaaaacagtagataagctcagatgctaatagaatgcagggatttgctagaaaagccctctgaaatctcggagacttcacagtatcatagctactatttttgggagaatttggtggagttgtcaccattacacaatgactgggatgtttttctcagtggacactgaaccagatctaactttctttgataatcatcctagggctgactttttcctcttctttctatgcttaaccaaagtctcacctggagaggaaagctgtgtgccgtggagatttcaggtcccagctgagccttctggctattggctttgtttttccacatgtaatcttgctttttgtggcctggggattggctgtgtgatcagcattgaaatgggttgttgcagtttgaagtctggaaggggtatgtccctgggttctaattctttccctctaggtttctgtactcagctcagagtctagaatggtaacttttaggattggaaaagaccaaagttacctaattcaactctttcatttttttttcagtggaaaaactaatacccagaaaagggaagagagttaacccaaaaattacatctagtgaattgtctgattagctttacaattgaggcattgtagagctctttgaggcattagtcttggttgtctgagtgcctggctattaaaggctgtctttgcctgttccctctttctgttagctgcctggaagtgcagggttgcttcacttttagcaccttgactctgtacctgacatggtgcttcaacaggatattgctttgttaccacaggccctttgaacttggaaaaaaaaaataccaccctaagctaaaacatttgcctgatgacaaactacaaagattttgaaacctcataatctcaccactaaaggaggcgtaaatgaaaataaatgttggtgatgatttcagtggagtaccagttttactttgggaaatattcttgtatttcaattatcgttttctgtttttagataatgcttttgatagttgttgggtaatcatagttatcctcaggtatctctcctctttgtcacaacctctttgccccgtatgatgagaacaccaagctcttatatatatatcttagcataagacaaccatattctgtattccttttcaaaaaatattttcttgcttttttaaacaattgaatttcacagtccattaaaacattttatagaagcctaaagagagtttgttgtgtataatatctgcatataaacttaaaatatgcagttatctgtacataattttctcaaaaacttgcagtgcgtagctctgattgatgtctatttgtcttttttttctttctcctttcttcctgctttgttcctccacgtcattttgaaaaggaatataggcaggtatcattctacatttattgatgtcatttttaattttttttccattggcatgctatagtatctggaatttttgtgtaccaggtttgatgagcacctttataattaattttaaaaaggtgtgtggaatgtctgtcttcagtgtgtcttcaagcttggtcttatgggtgatagggagggtactgattctggtagtcatggatttaaaattttgttaatatttttgacatcttattaaggagaaagctgccggccttattttaggctccctcatcttctgtttacctttagcctttgttccagtggagaagctacacattatgtttggtctcctcagcctgatgctgtctgagtatctgacctaaaggcttccaagacaaagatggtcccacagggctctcagcagcctggaagagtatcgttgttcagaccagattgaagattgtgttctgcccagagggagtttgttgggccctcatctctaccagatccaaggactgtttctcacagagactcagtaggatgtggaagaagaaggccgtggctccgttggctcagggaacatctgccttttcccctcctgccacctcccctggcagtggagggtgacctgtctctctccttggcacctcatcagagattcttctctcttggacaacaccctccatcctcggaacccttttctttccttatctcgggaaaccttccatattgtacctacttctcattctcttattactgccttcctccgccatcaaacagcatttacccctcctgttggccattctgtcagaacccctctttgaacctctgtagctggttcactccttccttcctgcttgtcccagggagaggatcgtggctaagttctcctgggcacgtgttctgttctacccttgaagagcagtgccaggcctgggtacagcatgagtggcagcctccctgccagctgatagccctagctttccactgtcaccagcggagggtaagggaacagtccagcagcttcagaggcctgacgtggctcatgctgcccgtggctctgcagatgtgtgattctttctgtgtgtgagagagacaccaaagcccacagtcaaattctcagtcactttcgtaaattacaaggaagatgggctgtatagaatcattgaagattataaaaatgttggtttttacctttaaagtaacttctttgtttatcctttccatgttaattgctactccctgagtttattcatcttttgtttatctatcaagcatgtgttcagtagctgttaggtaccaggcactgggattcagtggtgagcaggacagctgcagcctttgcttccgtgcacagctcacggcattgctcgaatgatgccacaggcatctgcttctctctgccgcttccgtttctatcttccatggggcttccctcccaggagagcgtgcctcatatgtgcctggctttcgttctttgctctgcctgctttgcatggtccaggctctgtagcctggcatttaattattctgttccagcttcccttccttggtgctttttcccctcctgccacctcccctggcaatggagggcgacctgtctcctcggcacctcgccagagactgtcatatgtccaaggacaacttatcctttaagcacagtgcctagagcacacacttgttaggggcccataaaatgtctaatttcacttaaaatcagaaaacatagttgagaaatataacttgtaatattttttatggaggaagggaaaagtgtttagggcctatggaagtcacagtgtagtcctgcttgtgatacgtgccccattgtgtgttgctggatagttgctgctggacctgaccggttgctcccagagacaggaactcacagagtacgagaaacatgcctgagagccctccacatctcaggccctaactcagggcctggcttgtcttaggctctgcaaacatagcacagtgacagttgttgaagtgtagcagcagctttttgcagggaaagagggagttgtatttattgcttctccatgacatggttcttttctcattagttcatgggcaagtcaagggaaagagacctaggtagcagctgagtctgtagcctacagatggcctgggctggcttggctcagtcacttcccttagtcacttccacacattccagaaattgtgtttttcttacaggtgacagaggaagttatatatggaaggtagggttaggggcaccaaccccctgtgcaattgacaatccatgcataactttgaccctccaaaacatagctaataataatagcccactgttgactggaagccttaccaataacataaacagactagtaacctgtatatatcttatgtattcatgatgtacctttttctgaaatt

SEQ ID NO: 1957 - protein, 406 aa, Homo sapiens
MDGNDNVTLLFAPLLRDNYTLAPNASSLGPGTDLALAPASSAGPGPGLSLGPGPSFGFSPGPTPTPEPTTSGLAGGAASHGPSPFPRPWAPHALPFWDTPLNHGLNVFVGAALCITMLGLGCTVDVNHFGAHVRRPVGALLAALCQFGLLPLLAFLLALAFKLDEVAAVAVLLCGCCPGGNLSNLMSLLVDGDMNLSIIMTISSTLLALVLMPLCLWIYSWAWINTPIVQLLPLGTVTLTLCSTLIPIGLGVFIRYKYSRVADYIVKVSLWSLLVTLVVLFIMTGTMLGPELLASIPAAVYVIAIFMPLAGYASGYGLATLFHLPPNCKRTVCLETGSQNVQLCTAILKLAFPPQFIGSMYMFPLLYALFQSAEAGIFVLIYKMYGSEMLHKRDPLDEDEDTDISY

SEQ ID NO: 1958 - protein, 496 aa, Homo sapiens [sequence omitted]

SEQ ID NO: 1959 - protein, 140 aa, Homo sapiens [sequence omitted]

SEQ ID NO: 1960 - protein, 153 aa, Homo sapiens
MGQTHSCSQAPSVWPTNPAYVSDLTKRLDQVYRRLESPYPWKWGEKRISSPRPKLVSPVVGPEHPELWKLTVASYHIRIWSGNQVMGTRNHKPYYTINLNYNLKIPLQSCVKPPYMLVVGNIAIKPDSQTTTSENCRLFTCIDSTFDWQNGTL

SEQ ID NO: 1961 - protein, 106 aa, Homo sapiens [sequence omitted]

SEQ ID NO: 1962 - protein, 116 aa, Homo sapiens [sequence omitted]

SEQ ID NO: 1963 - protein, 235 aa, Homo sapiens
MFFWLANFVLALGQVTLAGAFASYYWALRKPDDLPAFPLILAIVQIIRVILEYLDQRLKAAENKFAKCLMTCLKCCFWCLEKFIKFLNRNAYIMIAIYGTNFCTSARNAFFLLMRNIIRVAVLDKVTDFLFLLGKLLIVGSVGILAFFFFTHRIRIVQDTAPPLNYYWVPILTVIVGSYLIAHGFFSVYGMCVDTLFLCFLEDLERNDGSAERPYFMSSTLKKLLNKTNKKAAES

SEQ ID NO: 1964 - protein, 327 aa, Homo sapiens
MLLHLTQHKRFHITENSYQCKDCGKAFNWFSTLTTHRRIHTGEKPYKCEECGKAFNRSSHLTTHKIIHTGEKPYRCEECGKAFNRSSHLTTHKRIHTGVKPYKCTECGKAFNRSSHLTTHRIIHTGEKPYKCEECGKAFNQSSTLTTHKITHAGEKPYKCEECGKAFYRFSYLTKHKTSHTGEKFYKCEECGKGFNWSSALTKHKRIHTGEKPYKCEECGKAFNESSNLTTHKMIHTGEKPYKCDECGKAFNRSSQLTAHKMIHTGEKPYKCEECGKAFNRSSTHTKHKITHTGEKSYKWEECGKDFNQSLSLIKQNNSYWRETLQM

SEQ ID NO: 1965 - protein, 217 aa, Homo sapiens
MKRRHIAKPFSMEKLLYQIAQAEAKKENGPTLSTISALLDELRDTELRQRRQLFEAGLHSSARYGSHDGSSTVADGKKKPRKWLQLETSERRCQICQHLCYLSMVSPPGPAGALACSAWPESSGVAPRRGRALSAQETCCAPISGAGCGTSAELLAAGGGCLTHSDQATQRLSLCSAHAWPSLGPAVRPSSLGSRWPPSPPYFVTPAPTHSALTHSF

SEQ ID NO: 1966 - protein, 402 aa, Homo sapiens
MNQENRSSFFWLLVIFTFLLKITASFSMSAYVTVTYYNETSNYTAIETCECGVYGLASPVANAMGVVGIPKNNNYQACDHNTEFSNTKKPWIALIERGNCTFSEKIQTAGRRNADAVVIYNAPETGNQTIQMANFGAVDIVAIMIGNLKGTKILQSIQRGIQVTMVIEVGKKHGPWVNHYSIFFVSVSFFIITAATVGYFIFYSARRLRNARAQSRKQRQLKADAKKAIGRLQLRTLKQGDKEIGPDGDSCAVCIELYKPNDLVRILTCNHIFHKTCVDPWLLEHRTCPMCKCDILKALGIEVDVEDGSVSLQVPVSNEISNSASSHEEDNRSETASSGYASVQGTDEPPLEEHVQSTNESLQLVNHEANSVAVDVIPHVDNPTFEEDETPNQETAVREIKS

SEQ ID NO: 1967 - protein, 408 aa, Homo sapiens [sequence omitted]

SEQ ID NO: 1968 - protein, 159 aa, Homo sapiens
MWVPAPSLALSISLSPTRGPQCSKSCSSGTRRRQVICAIGPPSHCGSLQHSKPVDVEPCNTQPCHLPQGKDRRAGRSPASDLSPTRYKPSKHVLPRGLCLHCVIPLDPTSPMSPPAEPFAISKAHLVCSPPGSPAFLHSAVACPCPSGPHSMLSFLWDP

SEQ ID NO: 1969 - protein, 517 aa, Homo sapiens
MTRLGTVPRKALEMSCAIQNQLARILAEFEMTLERDVLQPLSRLSEEELPAILKHKKSLQKLVSDWNTLKSRLSQATKNSGSSQGLGGSPGSHSHTTMANKVETLKEEEEELKRKVEQCRDEYLADLYHFVTKEDSYANYFIRLLEIQADYHRRSLSSLDTALAELRENHGQADHSPSMTATHFPRVYGVSLATHLQELGREIALPIEACVMMLLSEGMKEEGLFRLAAGASVLKRLKQTMASDPHSLEEFCSDPHAVAGALKSYLRELPEPLMTFDLYDDWMRAASLKEPGARLQALQEVCSRLPPENLSNLRYLMKFLARLAEEQEVNKMTPSNIAIVLGPNLLWPPEKEGDQAQLDAASVSSIQVVGVVEALIQSADTLFPGDINFNVSGLFSAVTLQDTVSDRLASEELPSTAVPTPATTPAPAPAPAPAPAPALASAATKERTESEVPPRPASPKVTRSPPETAAPVEDMARRSPRGATGRKERFACSYGTDSSLVDMFFVRLVNKLFWTKL

SEQ ID NO: 1970 - protein, 142 aa, Homo sapiens
MWMDRMRCGPSLIYIHVYLFISGWAKLSQLSCDLSLTSLSFPMTCDGIFSASWVPAVLGSGSSGWFSVSWVLAVLGSVSSGWFSVSWVLTLLESGSDGWFSVSWVPTVLESSSGGWFSASWVPAVLGSGGSSWFGGPLCCPC

SEQ ID NO: 1971 - protein, 308 aa, Homo sapiens
MRERRRERWKAKGGKLRGGGSRNRDWDRLPSAKRTQNGGGSGGGGGGSSRVAAVAAAAPPEGGSEGRLAPPSTSHSSLLAFFPTVPRSARLRPRSAHARPHAYECLRARRWLLPPTTTFGRPARQPARTRSPTGTPSSSPSLPLRPCQAGAGAGPHAYLQRRKPKPPPPPPPPPLLSSPPFPAPTATNRRHGRRRRRQPPLPPSTPRACASHNPPRGTVPFLSAAGAGEEGTGRAGRGLPFDWNCQNGGPSPTTTYLPGLLAAALRLASLCSSSSAGSRRADRGLPSAPLPTGGWRPRRLRVESFPAG

SEQ ID NO: 1972 - protein, 134 aa, Homo sapiens
MGVSGQEGRLKPALTAVTHSHSKLCIWASRHSASTWRFLTCAVSRRDWACTFHSIVKNAHPTLLAKAPSFSVLYASRCFRAFSMLMGDLSTSAHVSTRAHLDSTAATKYRNPCWGHMANQGSSGAEDSLTSESC

SEQ ID NO: 1973 - protein, 137 aa, Homo sapiens
MMAMLMLPLQGFLEDKARRAWEALPPRCSQCSFIPFLPCFLLPSAFSPRHCLPPSPRPAIQTLTLALSSMRPSEMALAATSEGAAPIHLQIRISGHPLPGLSCCCFISQEPRHLFSNWVEFLELKSNSALRGMRLWM

SEQ ID NO: 1974 - protein, 105 aa, Homo sapiens
MGNLRGKRQGPACPAMRGIPCPPALCLPRWNVGPCSPSGCAVSDLCLHPRGVSASSPPRSGCGPAACCGVLTCVTTAPLAPGGVMVSSWMLLLESFFLINLLQLR

SEQ ID NO: 1975 - protein, 413 aa, Homo sapiens
MELMHAEKLRKEKEEFEKASMDVENPDYSEEILKGELAWIIYKNSVSIIKGAEFHVSLLSIAQLFDFAKDLQKEIYDDLQALHTDDPLTWDYVARRELEIESQTEEQPTTKQAKAVEVGRKEERCCAVYEEAVKTLPTEAMWKCYITFCLERFTKKSNSGFLRGKRLERTMTVFRKAHELKLLSECQYKQLSVSLLCYNFLREALEVAVAGTELFRDSGTMWQLKLQVLIESKSPDIAMLFEEAFVHLKPQVCLPLWISWAEWSEGAKSQEDTEAVFKKALLAVIGADSVTLKNKYLDWAYRSGGYKKARAVFKSLQESRPFSVDFFRKMIQFEKEQESCNMANIREYYERALREFGSADSDLWMDYMKEELNHPLGRPENCGQIYWRAMKMLQGESAEAFVAKHAMHQTGHL

SEQ ID NO: 1976 - protein, 429 aa, Homo sapiens
MSEHQKEQTLDTPSLRTVTLTVRVHGFILEVSKTKNPPIPDTFWPPRWDHRPSPGGETNAYCQMNHVNPAMDFTQTPPGMLALDNMLYFAKHHQDAYIRIVLENSSREDKHECPFGRSSIELTKMLCEILKVGELPSETCNDFHPMFFTHDRSFEEFFCICIQLLNKTWKEMRATSEDFNKVMQVVKEQVMRALTTKPSSLDQFKSKLQNLSYTEILKIRQSERMNQEDFQSRPILELKEKIQPEILELIKQQRLNRLVEGTCFRKLNARRRQDKFWYCRLSPNHKVLHYGDLEESPQGEVPHDSLQDKLPVADIKAVVTGKDCPHMKEKGALKQNKEVLELAFSILYDSNCQLNFIAPDKHEYCIWTDGLNALLGKDMMSDLTRNDLDTLLSMEIKLRLLDLENIQIPDAPPPIPKEPSNYDFVYDCN

SEQ ID NO: 1977 - protein, 197 aa, Homo sapiens
MPRPLASSLSSVMGQTVSQEAAPPPGSQGWFWWSFSIPGLYLLGVDLVTACDIRYCAQDAFFQVKEVDVGLAADVGTLQRLPKVIRNQSLVNELAFTARKMMADEALGSGLVSRVFPDKEVMLDAALALAAEISSKSPVAVQSTKVNLLYSRDHSVAESLNYVASWNMSMLQTQDLVKSVQATTENKELKTVTFSKL

SEQ ID NO: 1978 - protein, 310 aa, Homo sapiens
MEDLEEDVRFIVDETLDFGGLSPSDSREEEDITVLVTPEKPLRRGLSHRSDPNAVAPAPQGVRLSLGPLSPEKLEEILDEANRLAAQLEQCALQDRESAGEGLGPRRVKPSPRRETFVLKDSPVRDLLPTVNSLTRSTPSPSSLTPRLRSNDRKGSVRALRATSGKRPSNMKRESPTCNLFPASKSPASSPLTRSTPPVRGRAGPSGRAAASEETRAAKLRACQPNATHQPECATWQRCPTSGFSVNSKRASKTKHCRTQSAGKWTQGSCFPATKSSCHGCHSQQSAAPQESGSPRTYQVKRSGQQARLQ

SEQ ID NO: 1979 - protein, 339 aa, Homo sapiens
MSGQLERCEREWHELEGEFQELQETHRIYKQKLEELAALQTLCSSSISKQKKHLKDLKLTLQRCKRHASREEAELVQQMAANIKERQDVFFDMEAYLPKKNGLYLNLVLGNVNVTLLSNQAKFAYKDEYEKFKLYLTIILLLGAVACRFVLHYRVTDEVFNFLLVWYYCTLTIRESILISNGSRIKGWWVSHHYVSTFLSGVMLTWPNGPIYQKFRNQFLAFSIFQSCVQFLQYYYQRGCLYRLRALGERNHLDLTVEGFQSWMWRGLTFLLPFLFCGHFWQLYNAVTLFELSSHEECREWQVFVLAFTFLILFLGNFLTTLKVVHAKLQKNRGKTKQP

SEQ ID NO: 1980 - protein, 109 aa, Homo sapiens
MRPPQPCGTDPCPLCDEAKEVLKPYENGQPYKDQKLPGTRRRRSPSSPSHPHMASQSGKRYNLTLNQVLSFDYDMGLDAPKTISSDCGAFYCLRMFKSPDMTCCFYPKQ

SEQ ID NO: 1981 - protein, 454 aa, Homo sapiens
MKFAFEEFHLWYQFALSLMAAGKSARAVKVLKECIRLKPDDATIPLLAAKLCMGSLHWLEEAEKFAKTVVDVGEKTSEFKAKGYLALGLTYSLQATDASLRGMQEVLQRKALLAFQRAHSLSPTDHQAAFYLALQLAISRQIPEALGYVRQALQLQGDDANSLHLLALLLSAQKHYHDALNIIDMALSEYPENFILLFSKVKLQSLCRGPDEALLTCKHMLQIWKSCYNLTNPSDSGRGSSLLDRTIADRRQLNTITLPDFSDPETGSVHATSVAASRVEQALSEVASSLQSSAPKQGPLHPWMTLAQIWLHAAEVYIGIGKPAEATACTQEAANLFPMSHNVLYMRGQIAELRGSMDEARRWYEEALAISPTHVKSMQRLALILHQLGRYSLAEKILRDAVQVNSTAHEVWNGLGEVLQAQGNDAAATECFLTALELEASSPAVPFTIIPRVL

SEQ ID NO: 1982 - protein, 391 aa, Homo sapiens
MKVLGHRLELLTGLLLHDVTMAGLQELRFPEEKPLLRGQDATELESSDAFLLAADTDWKEHDIETPYGLLHVVIRGSPKGNRPAILTYHDVGLNHKLCFNTFFNFEDMQEITKHFVVCHVDAPGQQVGASQFPQGYQFPSMEQLAAMLPSVVQHFGFKYVIGIGVGAGAYVLAKFALIFPDLVEGLVLVNIDPNGKGWIDWAATKLSGLTSTLPDTVLSHLFSQEELVNNTELVQSYRQQIGNVVNQANLQLFWNMYNSRRDLDINRPGTVPNAKTLRCPVMLVVGDNAPAEDGVVECNSKLDPTTTTFLKMADSGGLPQVTQPGKLTEAFKYFLQGMGYMPSASMTRLARSRTASLTSASSVDGSRPQACTHSESSEGLGQVNHTMEVSC

SEQ ID NO: 1983 - protein, 440 aa, Homo sapiens
MDEAGSSASGGGFRPGVDSLDEPPNSRIFLVISKYTPESVLRERFSPFGDIQDIWVVRDKHTKPIKVFIAQSRSSGSHRDVEDEELTRIFVMIPKSYTEEDLREKFKVYGDIEYCSIIKNKVTGESKGLGYVRYLKPSQAAQAIENCDRSFRAILAEPKNKASESSEQDYYSNMRQEALGHEPRVNMFPFEQQSEFSSFDKNDSRGQEAISKRLSVVSRVPFTEEQLFSIFDIVPGLEYCEVQRDPYSNYGHGVVQYFNVASAIYAKYKLHGFQYPPGNRIGVSFIDDGSNATDLLRKMATQMVAAQLASMVWNNPSQQQFMQFGGSSGSQLPQIQTDVVLPSCKKKAPAETPVKERLFIVFNPHPLPLDVLEDIFCRFGNLIEVYLVSGKNVGYAKYADRISANDAIATLHGKILNGVRLKVMLADSPREESNKRQRTY

SEQ ID NO: 1984 - protein, 135 aa, Homo sapiens
MRPRMLPVFFGESIKVSPEPTHEIRCNSEVKYASEKHFQDKVFYAPVPTVTAYSETIVAAPNCTWRNYRSQLTLEPRPRALRFRSTTIIFPKHARSTFRTTLHCSLGRPSRWFTASVQLQLCQDPAPSLLGPATL

SEQ ID NO: 1985 - protein, 113 aa, Homo sapiens
MEFVMKQALGGATKDMGKMLGGDEEKDPDAAKKEEERQEALRQGIRDKYGIKKKEEREAEAQAAMEANSEGSLTRPKKAIPPGCGDEVEEEDESILDTVIKYLPGPLQDMLKK

SEQ ID NO: 1986 - protein, 125 aa, Homo sapiens
MPTENWDPAQSAGLVAEMMWGAGQSTWMQRGRAARWACPQDNSFLGIRAPGTARQPREACQLQKRASGVLGDWLPGLGQELGTCTDKGRRNSSQEGVQIHTGMYFVRKVGFHSCKQKTGALDRWG

SEQ ID NO: 1987 - protein, 155 aa, Homo sapiens
MRCPLQPVQAYTGVQPGGYSQGEPFSHRRALGCGAWGTGSGTALSRARNELSDHLDAMDSNLDNLQTMLSSHGFSVDTSALLDLFSPSVTVPDMSLPDLDSSLASVRRRAGGEGERGREQQPGFREAAGALHSAAAVPAGPRLRGHREQRPAGAV

SEQ ID NO: 1988 - protein, 236 aa, Homo sapiens
MLTPSSQVHAYIISSLKKEMPNVFGKESKKKELVNNLGEIYQKIEREHQISPGDFPSLRKMQELLQTQDFSKFQALKPKLLDTVDDMLANDIARLMVMVRQEESLMPSQVVKGGAFDGTMNGPFGHGYGEGAGEGIDDVEWVVGKDKPTYDEIFYTLSPVNGKITGANAKKEMVKSKLPNTVLGKIWKLADVDKDGLLDDEEFALANHLIKVKLEGHELPADPPPHLVPPSKRRHE

SEQ ID NO: 1989 - protein, 105 aa, Homo sapiens
MPLTWLLASGMGPLMFLSFHSNFPFLCLSTLFSWKFSHLYLSDLLLRFSFLVAFFLVGGGGLTISHRLEHSGAIIAYCNLELLGSSDPLASASQVSGTAGMCHCT

SEQ ID NO: 1990 - protein, 240 aa, Homo sapiens [sequence omitted]

SEQ ID NO: 1991 - protein, 423 aa, Homo sapiens [sequence omitted]

SEQ ID NO: 1992 - protein, 157 aa, Homo sapiens
MAVDALEYDESAEDANPAGALEEILENPERLKDLDLDAFAEELERQGYGDKHITLYDIRAELSCRYKDLRTAYRSPNTEEIFNMLTKETPETFYIGKLIICNVTGIAHRRPQGESYDQAIRNDETGLWQCPFCQQDNFPELSEVCAAALSCSVDFLG

SEQ ID NO: 1993 - protein, 257 aa, Homo sapiens
MAHYITFLCMVLVLLLQNSVLAEDGEVRSSCRTAPTDLVFILDGSYSVGPENFEIVKKWLVNITKNFDIGPKFIQVGVVQYSDYPVLEIPLGSYDSGEHLTAAVESILYLGGNTKTGKAIQFALDYLFAKSSRFLTKIAVVLTDGKSQDDVKDAAQAARDSKITLFAIGVGSETEDAELRAIANKPSSTYVFYVEGYIAISKIREVMKQKLCEESVCPTRIPVAARDERGFDILLGLDVNKKVKKRIQLSPKKDKRI

SEQ ID NO: 1994 - protein, 106 aa, Homo sapiens
MTSGFFIGGPSNMISSAISADLGRQELIQRSSEALATVTGIVDGSGSIGAAVGQYLVSLIRDKLGWMWVFYFFILMTSCTIVFISPLIVREIFSLVLRRQAHILRE

SEQ ID NO: 1995 - protein, 114 aa, Homo sapiens [sequence omitted]

SEQ ID NO: 1996 - protein, 419 aa, Homo sapiens
MDQTCELPRRNCLLPFSNPVNLDAPEDKDSPFGNGQSNFSEPLNGCTMQLSTVSGTSQNAYGQDSPSCYIPLRRLQDLASMINVEYLNGSADGSESFQDPEKSDSRAQTPIVCTSLSPGGPTALAMKQEPSCNNSPELQVKVTKTIKNGLLHFENFTCVDDADVDSEMDPEQPVTEDESIEEIFEETQTNATCNYETKSENGVKVAMGSEQDSTPESRHGAVKSPFLPLAPQTETQKNKQRNEVDGSNEKAALLPAPFSLGDTNITIEEQLNSINLSFQDDPDSSTSTLGNMLELPGTSSSSTSQELPFCQPKKKSTPLKYEVGDLIWAKFKRRPWWPCRICSDPLINTHSKMKVSNRRPYRQYYVEAFGDPSERAWVAGKAIVMFEGRHQFEELPVLRREERKKERKRKRKEKERKKE

SEQ ID NO: 1997 - protein, 103 aa, Homo sapiens
MEGSSHPTAWLPSGLFSLLLSVSFSVSPLLIMAHCSLDLPRLSDPLASASQVAETTGVRHHTWLIFIFIFVETGLALFPRLVSNSWAQAIPLPLPPKVLGLQA

SEQ ID NO: 1998 - protein, 193 aa, Homo sapiens
MESLSLLLHTLPMSPEEEGGRDGGVQERAPGALSARGKGVLDLRRRGKGFLKIFCSSFPENERRMGEGGKHLTGTRPTSTNVSALPPPGEKPFRCEFEGCERRFANSSDRKKHSHVHTSDKPYTCKVRGCDKCYTHPSSLRKHMKVHGRSPPPSSGYDSATPSALVSPSSDCGHKSQVASSAAVAARTADLSE

SEQ ID NO: 1999 - protein, 118 aa, Homo sapiens
MRRLIPFLFSFGSISALLSGRIYVGLLPRRKLQAQKRGCVIRCHLSGCLCCYLSVALPLPRSLPLPANQFYLPFTPQSFISVARILISYQRKTTTALLPGPLLLSNVPQTGIRRPEES

SEQ ID NO: 2000 - protein, 140 aa, Homo sapiens
METVIMITYWDLISHSEMFSDSYMSQEIADGLRLEVEGKIVSRTEGNIFDSLIGGNASAEGPEGKGTESTVITGVDSVMNHHLQETSFTKEAYNKCIKDYMKSIKGKLEEQRPKRVKPFMTGAAEQIKHILANFKNYQKT

SEQ ID NO: 2001 - protein, 123 aa, Homo sapiens
MPLPGTPGPVTTSPQTPTPRPLTTDWRILSGKGSGGSARAVSKLRSSSSGNSLLRIRDLGVRKSQEEAAPPSPRPQSRAHAQTTNPYWADTNTRPGAHPPEHGGVAALPAQVVGQCHQEATED

SEQ ID NO: 2002 - protein, 113 aa, Homo sapiens [sequence omitted]

SEQ ID NO: 2003 - protein, 197 aa, Homo sapiens [sequence omitted]

SEQ ID NO: 2004 - protein, 113 aa, Homo sapiens [sequence omitted]

SEQ ID NO: 2005 - protein, 115 aa, Homo sapiens
MDGGRQRENEEDVKAETSDNIIRSRETYCHKNNTGKTRLHNSVISHWVPPTTRGNYGSYKMRFGWGYRAKPYLSAPGPSQISYLHISKPIMPSQQSPKVSTLFSINPKIQVQSLI

SEQ ID NO: 2006 - protein, 210 aa, Homo sapiens
MHGNVHVCTVCGVYAWCVHVCTVCGVYAWCVHMCTVYAWCVHVCTVYAWCVHVCTVWCVCMVCAHVHCVCMVMCTRALCVCMVMCTCALCVVCMHGVCTCALCMHGNVHVCTVWCVCMVCARVHCVCIVCARVHCVWMHGNVHVCTVCGVYAWCVHVCTVCGVYAWCVHVCTVCMRVWCVCMYAWCVHTCAAAPGPISSAQQHHTHFGAL

SEQ ID NO: 2007 - protein, 118 aa, Homo sapiens [sequence omitted]

SEQ ID NO: 2008 - protein, 126 aa, Homo sapiens
MERLRVDPRDGHEPPESHFIVSKASTNTISPLVLNAAREVKGGGVWGEHFCVHPFCDSEKDSKVELQSQEVAEDFNRLLGGEEGASEARMYPSQKSEDHSLPSVIRRAPDLRGCWGQPVRGTRLGL

SEQ ID NO: 2009 - protein, 233 aa, Homo sapiens
MLTLNLVKQHTGKPESTLETSVNQDTGVGGFHTCFYNLNSTTITLTISNSESIHQSLETQEVLEVTSSYLANPNFTSNSMEIKSAQENPFLFSTIKQTVEELNTNKESVIAIFVPAKNSKLSVNSFISAQKETTEVEDIDIEDSLYKDVDYGTEVLQIEHSYCRQDINKEHLWQKVSKLHSKITLLEFKEQQTLGRLKSLEALIRQLKQENWLSEENVKIIENRFTTYEVTMI

SEQ ID NO: 2010 - protein, 638 aa, Homo sapiens [sequence omitted]

SEQ ID NO: 2011 - protein, 111 aa, Homo sapiens [sequence omitted]

SEQ ID NO: 2012 - protein, 119 aa, Homo sapiens
MLTTSPIPATSSPLWEKARCPAPWGRVRVLRGWYVPRKSKIFSWWSRPEVAMYLVREEGSINMSVNGFTKQAVAKSRHQVWLGRKRLIVITTAITLNTPQASSQLSCTQLILFLFPFKR

SEQ ID NO: 2013 - protein, 182 aa, Homo sapiens
MEREEEGGTGTVILPSRKCLSSTSPKLASGCCPWPSRMRACPCWDAGIQLLVLVSGGRCREGSQGLFIDPRGGRWWCPVTEPLLAKPVSLQSQLLAQWIEQPYLKHFHFSVLIWHVPPPSLPPSLSPSLPFSLPPFLPPSLSPLLNSKKWGPTFFLQLEDSLLFITVESQVSQGFSQAVQQA

SEQ ID NO: 2014 - protein, 488 aa, Homo sapiens [sequence omitted]

SEQ ID NO: 2015 - protein, 169 aa, Homo sapiens
MVPRAPPCAWLRPGRRAQAGEGPRDPGNAAWRTRRTGFPEATGPARHLQLLYVDFGRWTHGRPVPLCRAGWRPRCPGAAAALGLAGLGDHIWPPGRTVPQDPPAWAPPSSLAHSLGAPVGAGAAGCPCGPAIHRPAHAASPSTCLPTPPQPPTSHLEETMGPAPPAPGC

SEQ ID NO: 2016 - protein, 309 aa, Homo sapiens
MSALGTLRCGPSIPSVFPSVLGSLRCGPSTPSVFPSVLRMLRCGPSSPSVFSSVLGMLKCGPSIPSVFPSVLRMLRCGPSSPSVFSSVLGMLRCGPSSPSVFPSVLRMLRCGPSLPSVFSSVLGMLSCGPSIPSVFSSVLRMLRCGPSIPSVFSSVLRMLRCGPSIPSVFSSVLGMPIPLVFYLQLSLFFVSSLPTQVERGGDPIACEEDTAPGWTLQIVKFKSQLLGRSLCVKIMGVRQIQGPHSALLCTSECRSSCLVTRTLRRSMDPARGDRVSPVSWDLRLPGWSPSPDLVIRLPLSPKVLGLQA

SEQ ID NO: 2017 - protein, 117 aa, Homo sapiens [sequence omitted]

SEQ ID NO: 2018 - protein, 180 aa, Homo sapiens
MELAALGLSPCPRLLHAELLPGLLTVFSLRFLQDYGGYLSTYILPAKGENQGQTFTCGSALSPITDFKLYASAFSERYLGLHGLDNRAYEMTKVAHRVSALEEQQFLIIHPTADEKIHFQHTAELITQLIRGKANYSLQVQYACYSVLNLEQDIPFMEKDLTGVQGLLLQQTRLCCGGRC

SEQ ID NO: 2019 - protein, 892 aa, Homo sapiens
MHGFRRTLRNAVLTQKQDSLRIISIQPVAGTNQLDMLFAVEMHSSEFYKPAYLIQKLSNARRHLENIMRISAILEKNCSGLDCQEQHCEQGLSLDSHALMTYSTARISFVCPRFYRNVRCTCNGGLCPGSNDPCVEKPCPGDMQCVGYEASRRPFLCQCPPGKLGECSGHTSLSFAGNSYIKYRLSENSKEEDFKLALRLRTLQSNGIIMYTRANPCIILKIVDGKLWFQLDCGSGPGILGISGRAVNDGSWHSVFLELNRNFTSLSLDDSYVERRRAPLYFQTLSTESSIYFGALVQADNIRSLTDTRVTQVLSGFQGCLDSVILNNNELPLQNKRSSFAEVVGLTELKLGCVLYPDACKRSPCQHGGSCTGLPSGGYQCTCLSQFTGRNCESEITACFPNPCRNGGSCDPIGNTFICNCKAGLTGVTCEEDINECEREECENGGSCVNVFGSFLCNCTPGYVGQYCGLRPVVVPNIQAGHSYVGKEELIGIAVVLFVIFILVVLFIVFRKKVFRKNYSRNNITLVQDPATAALLNKSNGIPFRNLRGSGDGRNVYQEVGPPQVPVRPMAYTPCFQSDSRSNLDKIVDGLGGEHQEMTTFHPESPRILTARRGVVVCSVAPNLPAVSPCRSDCDSIRKNGWDAGTENKGVDDPGEVTCFAGSNKGSNSEVQSLSSFQSDSGDDNAYHWDTSDWMPGARLSDIEEVPNYENQDGGSAHQGSTRELESDYYLGGYDIDSEYPPPHEEEFLSQDQLPPPLPEDFPDQYEALPPSQPVSLASTLSPDCRRRPQFHPSQYLPPHPFPNETDLVGPPASCEFSTFAVSMNQGTEPTGPADSVSLSLHNSRGTSSSDVSANCGFDDSEVAMSDYESVGELSLASLHIPFVEAQHQTQV

SEQ ID NO: 2020 - protein, 932 aa, Homo sapiens [sequence omitted]

SEQ ID NO: 2021 - protein, 1060 aa, Homo sapiens
MLGEGLGPEWGPRPEHLPLAWLCVSASPGGSGRCELRQCSVLIPCRMASCGQGSVRLWRLRGGVLRSCPVDLGEHHALQFTDLAFKQARDGCPEPSAAMLFVCSRSGHILEIDCQRMVVRHARRLLPTRTPGGPHPQKQTFSSGPGIAISSLSVSPAMCAVGSEDGFLRLWPLDFSSVLLEAEHEGPVSSVCVSPDGLRVLSATSSGHLGFLDTLSRVYHMLARSHTAPVLALAMEQRRGQLATVSQDRTVRIWDLATLQQLYDFTSSEDAPCAVTFHPTRPTFFCGFSSGAVRSFSLEAAEVLVEHTCHRGAVTGLTATPDGRLLFSSCSQGSLAQYSCADPQWHVLRVAADMVCPDAPASPSALAVSRDGRLLAFVGPSRCTVTVMGSASLDELLRVDIGTLDLASSRLDSAMAVCFGPAALGHLLVSTSSNRVVVLDAVSGRIIRELPGVHPEPCPSLTLSEDARFLLIAAGRTIKVWDYATQASPGPQVYIGHSEPVQAVAFSPDQQQVLSAGDAVFLWDVLAPTESDQSFPGAPPACKTGPGAGPLEDAASRASELPRQQVPKPCQASPPRLGVCARPPEGGDGARDTRNSGAPRTTYLASCKAFTPARVSCSPHSAKGTCPPPASGGWLRLKAVVGYSGNGRANMVWRPDTGFFAYTCGRLVVVEDLHSGAQQHWSGHSAEISTLALSHSAQVLASASGRSSTTAHCQIRVWDVSGGLCQHLIFPHSTTVLALAFSPDDRLLVTLGDHDGRTLALWGTATYDLVSSTRLPEPVHGVAFNPWDAGELTCVGQGTVTFWLLQQRGADISLQVRREPVPEAVGAGELTSLCYGAPPLLYCGTSSGQVCVWDTRAGRCFLSWEADDGGIGLLLFSGSRLVSGSSTGRLRLWAVGAVSELRCKGSGASSVFMEHELVLDGAVVSASFDDSVDMGVVGTTAGTLWFVSWAEGTSTRLISGHRSKVRDFQPGQRRGSRTWCPPCLPAPSPPAQMIPSPAVTGSQRPPWGSQRGSLGCARPLKAVPVVSAQASRLAGLAGLLKLSFPCYCFAFFCLFVFCFL

SEQ ID NO: 2022 - protein, 112 aa, Homo sapiens [sequence omitted]

SEQ ID NO: 2023 - protein, 701 aa, Homo sapiens
MGSAADVRFSLGTTTHAPPGVHRRYSALREESAKDWETSPLPGMLAPAAGPAFDSDPEISDVDEDEPGGLVGSADVVSPSGHSDAQTLAMMLQEQLDAINEEIRMIQEEKESTELRAEEIETRVTSGSMEALNLKQLRKRGSIPTSLTALSLASASPPLSGRSTPKLTSRSAAQDLDRMGVMTLPSDLRKHRRKLLSPVSREENREDKATIKCETSPPSSPRTLRLEKLGHPALSQEEGKSALEDQGSNPSSSNSSQDSLHKGAKRKGIKSSIGRLFGKKEKGRLIQLSRDGATGHVLLTDSEFSMQEPMVPAKLGTQAEKDRRLKKKHQLLEDARRKGMPFAQWDGPTVVSWLELWVGMPAWYVAACRANVKSGAIMSALSDTEIQREIGISNALHRLKLRLAIQEMVSLTSPSAPPTSRTSSGNVWVTHEEMETLETSTKTDSEEGSWAQTLAYGDMNHEWIGNEWLPSLGLPQYRSYFMECLVDARMLDHLTKKDLRVHLKMVDSFHRTSLQYGIMCLKRLNYDRKELEKRREESQHEIKDVLVWTNDQVVHWVQSIGLRDYAGNLHESGVHGALLALDENFDHNTLALILQIPTQNTQARQVMEREFNNLLALGTDRKLDDGDDKVFRRAPSWRKRFRPREHHGRGGMLSASAETLPAGFRVSTLGTLQPPPAPPKKIMPEAHSHYLYGHMLSAFRD

SEQ ID NO: 2024 - protein, 291 aa, Homo sapiens
MGPFSSVNSLVLNEASTLAKRLSTFTTFIRPFSSMKSPVLNEARALSKRFATFTALIRSCASMNSPVLNEVRFAGKGFSTFTAFIGSFSSVNSLVLNQDKFAAKGFLTFTALIRPITSVNAAVSNEVRELSKGFPTFSAFIRSFSTVNSLVLNEFRFAAKRFPTITALIRHFSSVNSSMSNEIEDLSKGFPTLTALIRPFSRVNSLVSKKARALSKGFPALATFIRPFSSVNSLVFNEVRFVAKGFPTFTTLMTHSSSVTSLVVNEFRFMDKGFLTITAFIRPFSSVNYLV

SEQ ID NO: 2025 - protein, 167 aa, Homo sapiens
MCSLFHAFIFAQLWTVYCEQSAVATNLQNQNEFSFTAILTALEFWSRVTPSILQLMAHNKVMVEMVCLHVISLMEALQECNSTIFVKLIPMWLPMIQSNIKHLSAGLQLRLQAIQNHVNHHSLRTLPGSGQSSAGLAALRKWLQCTQFKMAQVEIQSSEAASQFYPL

SEQ ID NO: 2026 - protein, 121 aa, Homo sapiens [sequence omitted]

SEQ ID NO: 2027 - protein, 148 aa, Homo sapiens
MEGYLGRKHDLEGPNKKASNRSWNNLYCVLRNSELTFYKDAKDLALGMPYHGEEPLALRHAICEIAANYKKKKHVFKLRLSNGSEWLFHGKDEEEMLSWLQGVSTAINESQSIRVKAQSLPLPSLSGPDASLGKKDKEKRFSFFPKKK

SEQ ID NO: 2028 - protein, 191 aa, Homo sapiens [sequence omitted]

SEQ ID NO: 2029 - protein, 156 aa, Homo sapiens
MPPIILPTLYKPITAITPLIQNYKSTFRVTAQYPGSRQLWDKERGKICRSLERLKHKTGAGTFFSTLSWGAFQTTSALRGLHAHTTLTPTLKERSPFSSESWLILRSIWLFSVFRSWHCFRVSCSRMQAASSAVSSGTVGSAGYHPWEKLENLRES

SEQ ID NO: 2030 - protein, 124 aa, Homo sapiens [sequence omitted]

SEQ ID NO: 2031 - protein, 1016 aa, Homo sapiens
MLEMRDVYMEEDVYQLQELRQQLDQASKTCRILQYRLRKAERRSLRAAQTGQVDGELIRGLEQDVKVSKDISMRLHKELEVVEKKRARLEEENEELRQRLIETELAKQVLQTELERPREHSLKKRGTRSLGKADKKTLVQEDSADLKCQLHFAKEESALMCKKLTKLAKENDSMKEELLKYRSLYGDLDSALSAEELADAPHSRETELKVHLKLVEEEANLLSRRIVELEVENRGLRAEMDDMKDHGGGCGGPEARLAFSALGGGECGESLAELRRHLQFVEEEAELLRRSSAELEDQNKLLLNELAKFRSEHELDVALSEDSCSVLSEPSQEELAAAKLQIGELSGKVKKLQYENRVLLSNLQRCDLASCQSTRPMLETDAEAGDSAQCVPAPLGETHESHAVRLCRAREAEVLPGLREQAALVSKAIDVLVADANGFTAGLRLCLDNECADFRLHEAPDNSEGPRDTKLIHAILVRLSVLQQELNAFTRKADAVLGCSVKEQQESFSSLPPLGSQGLSKEILLAKDLGSDFQPPDFRDLPEWEPRIREAFRTGDLDSKPDPSRSFRPYRAEDNDSYASEIKELQLVLAEAHDSLRGLQEQLSQERQLRKEEADNFNQKMVQLKEDQQRALLRREFELQSLSLQRRLEQKFWSQEKNMLVQESQQFKHNFLLLFMKLRWFLKRWRQGKVLPSEGDDFLEVNSMKELYLLMEEEEINAQHSDNKACTGDSWTQNTPNEYIKTLADMKVTLKELCWLLRDERRGLTELQQQFAKAKATWETERAELKGHTSQMELKTGKGAGERAGPDWKAALQREREEQQHLLAESYSAVMELTRQLQISERNWSQEKLQLVERLQGEKQQVEQQVKELQNRLSQLQKAADPWVLKHSELEKQDNSWKETRSEKIHDKEAVSEVELGGNGLKRTKSVSSMSEFESLLDCSPYLAGGDARGKKLPNNPAFGFVSSEPGDPEKDTKEKPGLSSRDCNHLGALACQDPPGRQKLPFLLILAPPQPPPIL

SEQ ID NO: 2032 - protein, 251 aa, Homo sapiens
MQPGGTAGPEEAPMREAEAGPPQVGLSRPTCSLPASSPGPALPPGCVSRPDSGLPTTSLDSAPAQLPAALVDPQLPEAKLPRPSSGLTVASPGSAPALRWHLQAPNGLRSVGSSRPSLGLPAASAGPKRPEVGLSRPSSGLPAAFAGPSRPQVGLELGLEEQQVSLSGPSSILSAASPGAKLPRVSLSRPSSSCLPLASFSPAQPSSWLSAAFPGPAFDFWRPLQAQNLPSSGPLQARPRPRPHSGLSTPS

SEQ ID NO: 2033 - protein, 173 aa, Homo sapiens [sequence omitted]

SEQ ID NO: 2034 - protein, 205 aa, Homo sapiens [sequence omitted]

SEQ ID NO: 2035 - protein, 235 aa, Homo sapiens [sequence omitted]

SEQ ID NO: 2036 - protein, 162 aa, Homo sapiens [sequence omitted]

SEQ ID NO: 2037 - protein, 312 aa, Homo sapiens
MNILGLVLFALVLGVALKKLGSEGEDLIRFFNSLNEATMVLVSWIMWYVPVGIMFLVGSKIVEMKDIIVLVTSLGKYIFASILGHVIHGGIVLPLIYFVFTRKNPFRFLLGLLAPFATAFATCSSSATLPSMMKCIEENNGVDKRISRFILPIGATVNMDGAAIFQCVAAVFIAQLNNVELNAGQIFTILVTATASSVGAAGVPAGGVLTIAIILEAIGLPTHDLPLILAVDWIVDRTTTVVNVEGDALGAGILHHLNQKATKKGEQELAEVKVEAIPNCKSEEETSPLVTHQNPAGPVASAPELESKESVL

SEQ ID NO: 2038 - protein, 249 aa, Homo sapiens [sequence omitted]

SEQ ID NO: 2039 - protein, 110 aa, Homo sapiens [sequence omitted]

SEQ ID NO: 2040 - protein, 185 aa, Homo sapiens
MSLPEVQKDKYPEEFSLLKLQTKDGHRPEWTFYPRFSSNIHTYHVGKQCFFNGVFLGNKRSLSERTVDKCFGRKKYDIDPRNGIPKLTPGDNPYMYPEQSKGFHKAGSMLPPVNFSIVPYEKKFDTFIPLEPLPQIPNLPFWVKEKANSLKNEIQEVEELDNWQPAVPLMHMLHLSGALDFPRQS

SEQ ID NO: 2041 - protein, 165 aa, Homo sapiens [sequence omitted]

SEQ ID NO: 2042 - protein, 141 aa, Homo sapiens [sequence omitted]

SEQ ID NO: 2043 - protein, 1034 aa, Homo sapiens
MVDATTRMGYTPLHVASHYGNIKLVKFLLQHQADVNAKTKLGYSPLHQAAQQGHTDIVTLLLKNGASPNEVSSDGTTPLAIAKRLGYISVTDVLKVVTDETSFVLVSDKHRMSFPETVDEILDVSEDEGTAHITIMGEELISFKAERRDSRDVDEEKELLDFVPKLDQVVESPAIPRIPCAMPETVVIRSEEQEQASKEYDEDSLIPSSPATETSDNISPVASPVHTGFLVSFMVDARGGSMRGSRHNGLRVVIPPRTCAAPTRITCRLVKPQKLSTPPPLAEEEGLASRIIALGPTGAQFLSPVIVEIPHFASHGRGDRELVVLRSENGSVWKEHRSRYGESYLDQILNGMDEELGSLEELEKKRVCRIITTDFPLYFVIMSRLCQDYDTIGPEGGSLKSKLVPLVQATFPENAVTKRVKLALQAQPVPDELVTKLLGNQATFSPIVTVEPRRRKFHRPIGLRIPLPPSWTDNPRDSGEGDTTSLRLLCSVIGGTDQAQWEDITGTTKLVYANECANFTTNVSARFWLSDCPRTAEAVNFATLLYKELTAVPYMAKFVIFAKMNDPREGRLRCYCMTDDKVDKTLEQHENFVEVARSRDIEVLEGMSLFAELSGNLVPVKKAAQQRSFHFQSFRENRLAMPVKVRDSSREPGGSLSFLRKAMKYEDTQHILCHLNITMPPCAKGSGAEDRRRTPTPLALRYSILSESTPGSLSGTEQAEMKMAVISEHLGLSWAELARELQFSVEDINRIRVENPNSLLEQSVALLNLWVIREGQNANMENLYTALQSIDRGEIVNMLEGSGRQSRNLKPDRRHTDRDYSLSPSQMNGHQRGQARITHSPTVSQVTERSQDRLQDWDADGSIVSYLQDAAQGSWQEEVTQGPHSFQGTSTMTEGLEPGGSQEYEKVLVSVSEHTWTEQPEAESSQADRDRRQQGQEEQVQEAKNTFTQVVQGNEFQNIPGEQVTEEQFTDEQGNIVTKKIIRKVVRQIDLSSADAAQEHEEVELRGSGLQPDLIEGRKGAQIVKRASLKRGKQ

SEQ ID NO: 2044 - protein, 496 aa, Homo sapiens
MVEPHQEPRHSKVGLQDNPWFCDCHISKMIELSKVVDPAIVLLDPLMTCSEPERLTGILFQRAELEHCLKPSVMTSATKIMSALGSNVLLRCDATGFPTPQITWTRSDSSPVNYTVIQESPEEGVRWSIMSLTGISSKDAGDYKCKAKNLAGLSEAVVTVTVLGITTTPIPPDTSERTGDHPEWDVQPGSGRSTSVSSASSYLWSSSFSPTSSFSASTLSPPSTASFSLSPFSSSTVSSTTTLSTSISASTTMANKRSFQLHQGGKRNLKVAKNGSKLPPASTSKKEELALLDQTMLTETNAAIENLRVVSETKESVTLTWNMINTTHNSAVTVLYSKYGGKDLLLLNADSSKNQVTIDGLEPGGQYMACVCPKGVPPQKDQCITFSTERVEGDDSQWSLLLVVTSTACVVILPLICFLLYKVCKLQCKSEPFWEDDLAKETYIQFETLFPRSQSVGELWTRSHRDDSEKLLLCSRSSVESQVTFKSEGSRPEYYC

SEQ ID NO: 2045 - protein, 108 aa, Homo sapiens
MTFVFVFVFCFSRQGLALSSGMECSGVISAHCGFRHPVSSDPPTATSQVAGRSGARHHVWLVFVFFVETEFPHVAQAALRLLSSSDLPPAWPSQSSGITGVSHCAWPG

SEQ ID NO: 2046 - protein, 404 aa, Homo sapiens [sequence omitted]

SEQ ID NO: 2047 - protein, 382 aa, Homo sapiens
MVPRTHMSTNGTNPQSLPCPGFRLSLLDMTLLDSPCTQFRCEELGRVPFIIFLLSLFCQNTWEEMALQVTPTQHQAPGWGIHSLILSKSSSLLIPLHFLCLLMPVALSPLCFGSQAQIFRPLKFNTTSVIKIAVEPVNPSELPKMLDGLRKVNKSYPSLTTKVEESGEHVILGTGELYLDCVMHDLRKMYSEIDIKVADPVVTFCETVVETSSLKCFAETPNKKNKITMIAEPLEKGLAEDIENEVVQITWNRKKLGEFFQTKYDWDLLAARSIWAFGPDATGPNILVDDTLPSEVDKALLGSVKDSIVQGFQWGTREGPLCDECKSTSTPPPQSSRVLAARHMSGMGSPSLGFGRRSSLGYTGPSQVLGQLLPFSFLILVV

SEQ ID NO: 2048 - protein, 109 aa, Homo sapiens [sequence omitted]

SEQ ID NO: 2049 - protein, 109 aa, Homo sapiens
MIPRASLIVATAYPARSSLWTDSLRQAQRAHSLQSSPVSESLPLPQRSSEEVSPHPLPRRHPPASVCVTVGMVFVVSLSSRALLFLLFCTHWRGRTDGPPAGGQPSWQR

SEQ ID NO: 2050 - protein, 174 aa, Homo sapiens
MLEVHIPSVGPEAEGPRQSPEKSHMIKKLYKVPDFPSKRLPNWRTRGLEQRRQGLEAYIQGILYLNQEVPKELLEFLRLRHFPTDPKASNWGTLREFLPGDSSSQQHQRPVLSFHVDPYVCNPSPGEEVPRYGATGLGCGLCISRLLGPSDSISFLLPTSGATTSCSCPLEPAL

SEQ ID NO: 2051 - protein, 146 aa, Homo sapiens
MPMISVLGKMFLWQREGPGGRWTCQTSRRVSSDPAWAVEWIELPRGLSLSSLGSARTLRGWSRSSRPSSVDSQDLPEVLGPWWWGEGGRHPYKGDLQPPPTPGQPASGSLFRRAEALSGGGPGGRPRAGLLCSALCQQAESSRLPR

SEQ ID NO: 2052 - protein, 117 aa, Homo sapiens
MYLIRRAHCVTQPITTALIPAHRASWPGPLSTAVVSPDGPHLLLLQGCIPLCCPPKATSASGEDLAITHWGRDKCGSRRGNWGRREAACGTPSEALVFFVVPRERNACLLCRGQAEL

SEQ ID NO: 2053 - protein, 248 aa, Homo sapiens [sequence omitted]

SEQ ID NO: 2054 - protein, 165 aa, Homo sapiens [sequence omitted]

SEQ ID NO: 2055 - protein, 100 aa, Homo sapiens
MLNLVFKYWQQIHLLKTAMIKHVHRSNLAIGQQSMLSSWTCQGPNLLRQLLIEPPSSLRDWGKIGCLPSGPQATQAIPESGPQQRLEKVTSIPFTEPFLF

SEQ ID NO: 2056 - protein, 418 aa, Homo sapiens
MPMLLPHPHQHFLKGLLRAPFRCYHFIFHSSTHLGSGIPCAQPFNSLGLHCTKWMLLSDGLKRKLCVQTTLKDHTEGLSDKEQRFVDKLYTGLIQGQRACLAEAITLVESTHSRKKELAQVLLQKVLLYHREQEQSNKGKPLAFRVGLSGPPGAGKSTFIEYFGKMLTERGHKLSVLAVDPSSCTSGGSLLGDKTRMTELSRDMNAYIRPSPTRGTLGGVTRTTNEAILLCEGAGYDIILIETVGVGQSEFAVADMVDMFVLLLPPAGGDELQGIKRGIIEMADLVAVTKSDGDLIVPARRIQAEYVSALKLLRKRSQVWKPKVIRISARSGEGISEMWDKMKDFQDLMLASGELTAKRRKQQKVWMWNLIQESVLEHFRTHPTVREQIPLLEQKVLIGALSPGLAADFLLKAFKSRD

SEQ ID NO: 2057 - protein, 364 aa, Homo sapiens
MARTSHSRAKAEAALTAAQKAQEEARIARITAKEFSPSFQHRENGLEYQRPKRQTSCDDIEVLSTGTPLQQESPELYRKGTTPSDLTPDDSPLQSFPTSPAATPPPAPAARNKVAHFSRQVSVDEERGGDIQMLLEGRAGDCARSSWGEEQAGGSRGVRSGALRGGLLVDDFRTRGSGRKQPGNPKPRERRTESPPVFTWTSHHRASNHSPGGSRLLELQEEKLSNYRMEMKPLLRMETHPQKRRYSKGGACRGLGDDHRPEDRGFGVQRLRSKAQNKENFRPASSAEPAVQKLASLRLGGAEPRLLRWDLTFSPPQKSLPVALESDEENGDELKSSTGSAPILVVMVILLNIGVAILFINFFI

SEQ ID NO: 2058 - protein, 1012 aa, Homo sapiens [sequence omitted]

SEQ ID NO: 2059 - protein, 159 aa, Homo sapiens [sequence omitted]

SEQ ID NO: 2060 - protein, 112 aa, Homo sapiens [sequence omitted]

SEQ ID NO: 2061 - protein, 795 aa, Homo sapiens [sequence omitted]

SEQ ID NO: 2062 - protein, 105 aa, Homo sapiens
MGNEDGRAGRHSPATGQAIAPCSAVLKLASEGEGIVGRREGGQARFQLDNSYVFSSILLHSFIPLQVLIEAGPQGKHKDGSGTHLPFPRAYTLAGDIKHDRNNHR

SEQ ID NO: 2063 - protein, 152 aa, Homo sapiens
MPQHLSGVGCQEVCVSMKPDGPVCLCSMNGALAFVDTSDCTVMNIAEHYMASDVEWDPTGRYVVTSVSWWSHKVDNAYWLWTFQGRLLQKNNKDRFCQLLWRPRPPTLLSQEQIKQIKKDLKKYSKIFEQKDRLSQSKASKVSLIPKMRAVL

SEQ ID NO: 2064 - protein, 147 aa, Homo sapiens
MRSESPGKWGNSPGLHHSSTGKSPASSLPGRGVPELRVTPTAPSAEGGRKTAPSHGSAHSASPPASLSATDPWPLAAQTLSTPRRTNTTLMGPAAMSTPAAGAPSASTDPAQRIVVTGRGPTPRGHVAHAQLAQPTARTKSKVSFRE

SEQ ID NO: 2065 - protein, 101 aa, Homo sapiens
MWQSGRFHALLWEEYKWVQPLWRIVLHFLLKLKITFPTKVTTLYTSRSFIHVVIYRNATASSCTVVHGLCGYTHFPFVSPMTQLYISQFWIYTLENLYTSV

SEQ ID NO: 2066 - protein, 323 aa, Homo sapiens [sequence omitted]

SEQ ID NO: 2067 - protein, 157 aa, Homo sapiens
MLVFLQEMDKPCGCPPGVCDHGTGDRRDPWYSTVGLLPPVRAMSQRNLNAKTEQGPTGVTMTSNPITWGQIKKTTQEAEKLLERQGQAKTPDSMFLAMLAVVSCAVCFPCVEAKTYWAYVPNPLVVRLVLWSDTPPEIYYDQGAWAPGPLTPSDTEQ

SEQ ID NO: 2068 - protein, 300 aa, Homo sapiens
MVPPHRALHFPVAFPPGGKPCSQHIISVTGFVDSDRDDLKLMAYLAGAKYTGYLCRSNTVLICKEPTGLKYEKAKEWRIPCVNAQWLGDILLGNFEALRQIQYSRYTAFSLQDPFAPTQHLVLNLLDAWRVPLKVSAELLMSIRLPPKLKQNEVANVQPSSKRARIEDVPPPTKKLTPELTPFVLFTGFEPVQVQQYIKKLYILGGEVAESAQKCTHLIASKVTRTVKFLTAISVVKHIVTPEWLEECFRCQKFIDEQNYILRDAEAEVLFSFSLEESLKRAHVSPLFKVHFKGKVNQSK

SEQ ID NO: 2069 - protein, 301 aa, Homo sapiens
MLEFSKILCTKNNKQNNEFCKCIETVPQDSCKTCFPQQDQRDTLSILVPHGDKESSDKKIAVGTEWDIPRNESSDSALGDSESEDTGHDMTRQVSSYYGGEQEDWAEEDEIPFPGSKLIEVSAVQPNIANFGRSLLGGYCSSYVPDFVLQGIGSDERFRQCLMSDLSHAVQHPVLDEPIAEAVCIIADMDKWTVQVASSQRRVTDNKLGKEVLVSSLVSNLLHSTLQLYKHNLSPNFCVMHLEDRLQELYFKSKMLSEYLRGQMRVHVKELGVVLGIESSDLPLLAAVASTHSPYVAQILL

SEQ ID NO: 2070 - protein, 921 aa, Homo sapiens [sequence omitted]

SEQ ID NO: 2071 - protein, 168 aa, Homo sapiens
MNFYTHEVCLGGPLLWAPLPYDGSICSLLFQEDLRPTINGSQIQIPLQAANVHPHYRKPPDTSHLLAAQDTGTQILACPEQWLSRPGRGARAQSQAGLPAHFCLPGHHHLPPRMNLKLQGNEEKPRSEGTCNQGCPKWPLSRPISKYNPHRGCLVGQKSLGLVPVRGE

SEQ ID NO: 2072 - protein, 152 aa, Homo sapiens
MKTVTDEAGESAGKAWAPRRQLQVLRPQATKAERLESAEPRRRAERSGCGLTPPPGPAAAAAAAASASRLSRSRLTSAAVPAQYPPLRRRVGVQHPGALHPRPHRVHAAAQRLFLHAASTPLDAFLNPKHENNLFLWKISSPLKKIKKKKKE

SEQ ID NO: 2073 - protein, 101 aa, Homo sapiens [sequence omitted]

SEQ ID NO: 2074 - protein, 108 aa, Homo sapiens [sequence omitted]

SEQ ID NO: 2075 - protein, 108 aa, Homo sapiens [sequence omitted]

SEQ ID NO: 2076 - protein, 115 aa, Homo sapiens
MGNYLLRKLRQEMTTFERKLQDQDKKSQEVSSTSNQENENGSGSEEVCYTVINHIPHQRSSLSSNDDGYENIDSLTRKVRQFRERSETEYALLRTSVSRPCSCTHEHDYEVVFPH

SEQ ID NO: 2077 - protein, 214 aa, Homo sapiens
MADVWFIVASFLSGPITHHKGCVAATFFVHFFYLSVFFWMLAKALLILYGIMIVFHTLPKSVLVASLFSVGYGCPLAIAAITVAATEPGKGYLRPEICWLNWDMTKALLAFVIPALAIVVVNLITVTLVIVKTQRAAIGNSMFQEVRAIVRISKNIAILTPLLGLTWGFGVATVIDDRSLAFHIIFSLLNAFQGFFILVFGTILDPKIREALKG

SEQ ID NO: 2078 - protein, 123 aa, Homo sapiens [sequence omitted]

SEQ ID NO: 2079 - protein, 566 aa, Homo sapiens [sequence omitted]

SEQ ID NO: 2080 - protein, 130 aa, Homo sapiens [sequence omitted]

SEQ ID NO: 2081 - protein, 1004 aa, Homo sapiens [sequence omitted]

SEQ ID NO: 2082 - protein, 180 aa, Homo sapiens
MGIPMGKSMLVLLTFLAFASCCIAAYRPSETLCGGELVDTLQFVCGDRGFYFSRPASRVSRRSRGIVEECCFRSCDLALLETYCATPAKSERDVSTPPTVLPDNFPRYPVGKFFQYDTWKQSTQRLRRGLPALLRARRGHVLAKELEAFREAKRHRPLIALPTQDPAHGGAPPEMASNRK

SEQ ID NO: 2083 - protein, 108 aa, Homo sapiens [sequence omitted]

SEQ ID NO: 2084 - protein, 320 aa, Homo sapiens
MEKVRLWRGSESRAAICTGIGIGFYGNSETSDGVSQLSSALLHANHTLSTIDHLTVERLGEAVRTELTTLEEVLEPRTELVAAARGARRQAEAAAQQLQGLAFWQGVPLSPLQVAENVSFVEEYRWLAYVLLLLLELLVCLFTLLGLAKQSKWLVIVMTVMSLLVLVLSWGSMGLEAATAVGLSDFCSNPDPYVLNLTQEETGLSSDILSYYLLCNRAVSNPFQQRLTLSQRALANIHSQLLGLEREAVPQFPSAQKPLLSLEETLNVTEGNFHQLVALLHCRSLHKVKPLPSQFLLPRGASVSTHRTTSSFSLDPCHCA

SEQ ID NO: 2085 - protein, 616 aa, Homo sapiens
MDVMLENYCHLISVGCHMTKPDVILKLERGEEPWTSFAGHTCLEENWKAEDFLVKFKEHQEKYSRSVVSINHKKLVKEKSKIYEKTFTLGKNPVNSKNLPPEYDTHGRILKNVSELIISNLNPARKRLSEYNGYGKSLLSTKQETTHPEVKSHNQSARAFSHNEVLMQYQKTETPAQSFGYNDCEKSFLQRGGLITHSRPYKGENPSVYNKKRRATNIEKKHTCNECGKSFCRKSVLILHQGIHSEEKPYQCHQCGNAFRRKSYLIDHQRTHTGEKPFVCNECGKSFRLKTALTDHQRTHTGEKSYECLQCRNAFRLKSHLIRHQRTHTGEKPYECNDCGKSFRQKTTLSLHQRIHTGEKPYICKECGKSFHQKANLTVHQRTHTGEKPYICNECGKSFSQKTTLALHEKTHNEEKPYICSECGKSFRQKTTLVAHQRTHTGEKSYECPHCGKAFRMKSYLIDHHRTHTGEKPYECNECGKSFSQKTNLNLHQRIHTGEKPYVCNECGKSFRQKATLTVHQKIHTGQKSYECPQCGKAFSRKSYLIHHQRTHTGEKPYKCSECGKCFRQKTNLIVHQRTHTGEKPYVCNECGKSFSYKRNLIVHQRTHKGENIEMQ

SEQ ID NO: 2086 - protein, 773 aa, Homo sapiens [sequence omitted]

SEQ ID NO: 2087 - protein, 116 aa, Homo sapiens
MGVRPSTLGTLGHDVHPRVFAEQRERTLLAGTVPVSAPGSAPTAPSPRAARRRGSVIPPRPRLLSPTHHTGRRQPEGRFIDNLTGHKQAGDRTATGSGGGGGGATCGTRSAASAPA

SEQ ID NO: 2088 - protein, 398 aa, Homo sapiens
MQLNSHCVCNSTRTAYANPLTAYATQLALRMQLSSLCVCNPARSAYATQVALRMQLSSLCVCNSARTAYATQLALRMQVSSLCVCNSARSAYATQLALRMQLSSHCVCNSARSAYATQLALRMQLSSHCVCNSARSAYATQLALRMQLSSHCVCNSHCVCNSTRTAYATQLALRMQLNSHCICNSTRTACATQLTLRMQLSLLCVCNSTRTAYANQLTAYATQLALHMQRNSTHTAYATQLTLYATQLALHMQFNSHCVCKSTYCICNSTHCVCNSTRTAYATQLALRMQLNSHCVCNSARTAYATQLLQVLISGHFLFLTTTPSQYFSSLKSAQDEALDSRTCCMPLGLLEVCRLASPRLHPALSCLSCENPVASASPGSDFCLLPSSAAPLGPCLE

SEQ ID NO: 2089 - protein, 144 aa, Homo sapiens [sequence omitted]

SEQ ID NO: 2090 - protein, 137 aa, Homo sapiens
MLRFCAGLSDFAPVAVRSLQDLARIAIRGTIKKIIHQETVSKNGNGLKNTPRFKRRRVRRRRMETIVFLDKEVFASRISNPSDDNSCEDLEEERREEEEKTPPETKPDPPVNFLRQKVLSLPLPDPLKYYLLYYREK

SEQ ID NO: 2091 - protein, 173 aa, Homo sapiens
MSSWKAENGTLLEWDTGWPGFSRACPTKVASELALFSGRLFLDSGKHSHSKYWLTFYQPATLVERGPLTQLYQQAVSRSRGWRDTQCCSRPVWLRVCLVCPCTHGFLFSCRRPLLLGSTSFIPIGRRTYASAAEPVGSKAVLVTGCDSGFGFSLAKHLHSKGFLVFAGCLMKL

SEQ ID NO: 2092 - protein, 125 aa, Homo sapiens
MWDPFFFLDGVSLLLPRLECNGVISAHCNLCLLDSSDSPASASRVAGITGAYHRAWLIFSFLVEMGFHHVGQAGLKLPTSGDPPASASQSAGITGVSHHTWLGSSELYFFFLSKDGVSPCWPGWS

SEQ ID NO: 2093 - protein, 149 aa, Homo sapiens [sequence omitted]

SEQ ID NO: 2094 - protein, 243 aa, Homo sapiens
MEIRLVVNGNLVHTAVVPQLQLVASRSDIYFTATAAVNEVSSGGSSKGASARNSPQTPPGRDTPVFPSSLGEGEIQSKNLYKIPLRNLVGRSIERPLKSPLVSKVITPPTPISVGLAAIPVTHSLSLSRMEIKEIASRTRRELLGLSDEGGPKSEGAPKAKSKPRKRLEESQGGPKPGAVRSSSSDRIPSGSLESASTSEANPEGHSASSDQDPVADREGSPVSGSSPFQLTAFSDEDIIDLK

SEQ ID NO: 2095 - protein, 183 aa, Homo sapiens [sequence omitted]

SEQ ID NO: 2096 - protein, 191 aa, Homo sapiens
MRAPPFSQASKPDMRLTGSLLCSQFCLCMAEAILLFSPEHSLFFFCSRKARIRLHWAGQTLAILCAALGLGFIISSRTRSELPHLVSWHSWVGALTLLATAVQALCGLCLLCPRAARVSRVARLKLYHLTCGLVVYLMATVTVLLGMYSVWFQAQIKGAAWYLCLALPVYPALVIMHQISRSYLPRKKMEM

SEQ ID NO: 2097 - protein, 118 aa, Homo sapiens [sequence omitted]

SEQ ID NO: 2098 - protein, 121 aa, Homo sapiens [sequence omitted]

SEQ ID NO: 2099 - protein, 119 aa, Homo sapiens [sequence omitted]

SEQ ID NO: 2100 - protein, 447 aa, Homo sapiens
MDACSLLDETPPQSPTRALPRPLHPTPVVDWDARPLPPPPAYDDVAQDEDDFEICSINSTLVGAGVPAGPSQGQTNYAFVPEQARPPPPLEDNLFLPPQGGGKPPSSAQTAEIFQALQQECMRQLQAPAGSPAPSPSPGGDDKPQVPPRVPIPPRPTRPHVQLSPAPPGEEETSQWPGPASPPRVPPREPLSPQGSRTPSPLVPPGSSPLPPRLSSSPGKTMPTTQSFASDPKYATPQVIQAPGPRAGPCILPIVRDGKKVSSTHYYLLPERPSYLERYQRFLREAQSPEEPTPLPVPLLLPPPSTPAPAAPTATVRPMPQAALDPKANFSTNNSNPGARPPPPRATARLPQRGCPGDGPEAGRPADKIQMLQAMVHGVTTEECRAALQCHGWSVQRAAQYLKVEQLFGLGLRPRGECHKVLEMFDWNLEQAGCHLLGSWGPAHHKR

SEQ ID NO: 2101 - protein, 280 aa, Homo sapiens
MCHLGVGRFSCSLHLILFAENKQLTTVMTLAKAAAVVTFPEPLPFSVLWSPLVTCPGICLGAMFYQGRGLSLESRHPQWTLAILGCSAQLKPADAPPALPTRRSSMRERVWLGPWSHPVLLRVCSSPPPPSWLKTSPFSEPGPGPPLPAAPFRTFWVVSVVLGSLLGLLLPGLMAFLILPRVTQAMQRGLGRSEVSPGEAIYDVIGEMPPAGLYEEIMEAEAVLQDEEDGSVVKVDTEAAVSGEVSNLLEGQSIRAEGGHSRPVSQGYDEAAFPLEEMTL

SEQ ID NO: 2102 - protein, 147 aa, Homo sapiens
MLPLGEYQEQPHSSFFLSFPPLSAPSPVGHCISLPTIIGSVLLPTGMTPNLGVSSQPLCYTPPFTLPLRPSCAKDPSPSHSRLCSDSLLASLNLLYPLSQMWHSCHSAGFPSGGLVSILLLSPSMRECVCVCVCVCVCVCVCVCVCV

SEQ ID NO: 2103 - protein, 724 aa, Homo sapiens [sequence omitted]

SEQ ID NO: 2104 - protein, 250 aa, Homo sapiens
MNRPIQVKPADSESRGDRKLFVGMLNKQQSEDDVRRLFEAFGNIEECTILRGPDGNSKGCAFVKYSSHAEAQAAINALHGSQTMPVSAGPLGRGRGQRRAETPAPATPRRLSSLPKRQESMTLIPGLRQGRGSPGMLRNWPEVTQVENARGGVHTSFPWASADAASSKAPRGAGGVGAGQRHRQLRAEALEQVGLTRRPGRREPRPVWWSSSPTPTRSARCGECSRWLARWACSTPWPSLSGPTAPTLRQ

SEQ ID NO: 2105 - protein, 104 aa, Homo sapiens [sequence omitted]

SEQ ID NO: 2106 - protein, 634 aa, Homo sapiens
MLALFEVLSLKGWVEVRDVIIHRVGPIHGIYIHVFVFLGCMIGLTLFVGVVIANFNENKGTALLTVDQRRWEDLKSRLKIAQPLHLPPRPDNDGFRAKMYDITQHPFFKRTIALLVLAQSVLLSVKWDVEDPVTVPLATMSVVFTFIFVLEVTMKIIAMSPAGFWQSRRNRYDLLVTSLGVVWVVLHFALLNAYTYMMGACVIVFRFFSICGKHVTLKMLLLTVVVSMYKSFFIIVGMFLLLLCYAFAGVVLFGTVKYGENINRHANFSSAGKAITVLFRIVTGEDWNKIMHDCMVQPPFCTPDEFTYWATDCGNYAGALMYFCSFYVIIAYIMLNLLVAIIVENFSLFYSTEEDQLLSYNDLRHFQIIWNMVDDKREGVIPTFRVKFLLRLLRGRLEVDLDKDKLLFKHMCYEMERLHNGGDVTFHDVLSMLSYRSVDIRKSLQLEELLAREQLEYTIEEEVAKQTIRMWLKKCLKRIRAKQQQSCSIIHSLRESQQQELSRFLNPPSIETTQPSEDTNANSQDNSMQPETSSQQQLLSPTLSDRGGSRQDAADAGKPQRKFGQWRLPSAPKPISHSVSSVNLRFGGRTTMKSVVCKMNPMTDAASCGSEVKKWWTRQLTVESDESGDDLLDI

SEQ ID NO: 2107 - protein, 186 aa, Homo sapiens [sequence omitted]

SEQ ID NO: 2108 - protein, 293 aa, Homo sapiens [sequence omitted]

SEQ ID NO: 2109 - protein, 303 aa, Homo sapiens
MSDNGVCVLAFKCPGLLRYTAYRCKQLSDTSIIAVASHCPLLQKVHVGNQDKLTDEGLKQLGSKCRELKDIHFGQCYKISDEGMIVIAKGCLKLQRIYMQENKLVTDQSVKAFAEHCPELQYVGFMGCSVTSKGVIHLTKLRNLSSLDLRHITELDNETVMEIVKRCKNLSSLNLCLNWIINDRCVEVIAKEGQNLKELYLVSCKITDYALIAIGRYSMTIETVDVGWCKEITDQGATLIAQSSKSLRYLGLMRCDKVNEVTVEQLVQQYPHITFSTVLQDCKRTLERAYQMGWTPNMSAASS

SEQ ID NO: 2110 - protein, 131 aa, Homo sapiens
MPSTFVHNLYFYFFCPPLLVIMVLKNYIYRHKMHYFFSFLFFFFFETESCSVTQAGVQWRDLGSLQPLPPGFTQFSCLSLPSSWDYRHMPPCPANFLYFFSRDRVSPCWPGWSRTPDLVIHPPQPSKVLGL

SEQ ID NO: 2111 - protein, 108 aa, Homo sapiens
MESSCTIEGGSASGLLLADLGSCSIGCRGGTGGASCCVFVCVCGCGLRQAGPPPFQLSPCSSPAALPSPMSCGLVSWCLHPECLLPSLPARAITQLLPLPRQWVGAHM

SEQ ID NO: 2112 - protein, 498 aa, Homo sapiens
MESPRGWTLQVAPEEGQVLCNVKTATRGLSEGAVSGGWGAWENSTEVPREAGDGQRQQATLGAADEQGGPGRELGPADGGRDGAGPRSEPADRALRPSPLPEEPGCRCGECGKAFSQGSYLLQHRRVHTGEKPYTCPECGKAFAWSSNLSQHQRIHSGEKPYACRECGKAFRAQSQLIHHQETHSGLKPFRCPDCGKSFGRSTTLVQHRRTHTGEKPYECPECGKAFSWNSNFLEHRRVHTGARPHACRDCGKAFSQSSNLAEHLKIHAGARPHACPDCGKAFVRVAGLRQHRRTHSSEKPFPCAECGKAFRESSQLLQHQRTHTGERPFECAECGQAFVMGSYLAEHRRVHTGEKPHACAQCGKASSQRSNLLSHRRTHSGAKPFACADCGKAFRGSSGLAHHRLSHTGERPFACAECGKAFRGSSELRQHQRLHSGERPFVCAHCSKAFVRKSELLSHRRTHTGERPYACGECGKPFSHRCNLNEHQKRHGGRAAP

SEQ ID NO: 2113 - protein, 372 aa, Homo sapiens
MLLAELSRERGELQGERGELRGRLARLELERAQLEMQSQQLRESNQQLDLSACRLTTQCELLTQLRSAQEEENRQLLAEVQALSRENRELLERSLESRDHLHREQREYLDQLNALRREKQKLVEKIMDQYRVLEPVPLPRTKKGSWLADKVKRLMRPRREGGPPGGLRLGADGAGSTESLGGPPETELPEGREADGTGSPSPAPMRRAQSSLCLRDETLAGGQRRKLSSRFPVGRSSESFSPWDTPRQRFRQRHPGPLGAPVSHSKGEGQGSLYQPAPQLFVDPPAPWGRRLPSCPLCLLQALSTSALALGPVVALCLPGPGVGWENSAETLQEHETDANREGEWGTVEGVVFFVLPGAPGRTSFIHSFIRQ

SEQ ID NO: 2114 - protein, 297 aa, Homo sapiens
MQEITKHFVVCHVDAPGQQVGASQFPQGYQFPSMEQLAAMLPSVVQHFGFKYVIGIGVGAGAYVLAKFALIFPDLVEGLVLVNIDPNGKGWIDWAATKLSGLTSTLPDTVLSHLFSQEELVNNTELVQSYRQQIGNVVNQANLQLFWNMYNSRRDLDINRPGTVPNAKTLRCPVMLVVGDNAPAEDGVVECNSKLDPTTTTFLKMADSGGLPQVTQPGKLTEAFKYFLQGMGYIAYLKDRRLSGGAVPSASMTRLARSRTASLTSASSVDGSRPQACTHSESSEGLGQVNHTMEVSC

SEQ ID NO: 2115 - protein, 101 aa, Homo sapiens
MIIHFQQHFLVCSLVSRKKMSLRSERRGIHVDPVQERMWLLWQPYLAGFLLQVLEGRVAQSQAEADSGVLGAGGTTPAGGRRGLCQQSEQPRGPIPHILQV

SEQ ID NO: 2116 - protein, 106 aa, Homo sapiens
MVFLLQPLDIPDGRRAPLPAHYRSSSTRSIDTQTPSVQERSSSCSSHSPCVSPFCPPESQDGSPCSTEDLLYDRDKGLVSLSRPLSFHVLTKTRLISSQPDQLSVL

SEQ ID NO: 2117 - protein, 111 aa, Homo sapiens
MRLTGRTTAPPAPTPTPAQSPAQSPTPLQCSRSQARGDGPTERSRHSPLPCCRSASRLRLPGGGAGSDVTQSQWECSALRVGGLRVHRAVALVGLPLRSAPRDGDVWLRSG

SEQ ID NO: 2118 - protein, 368 aa, Homo sapiens [sequence omitted]

SEQ ID NO: 2119 - protein, 195 aa, Homo sapiens
MPVVPATWEAEARGSLEAGRQRLQRAEITPLHSGLGDRVETLSQTKKSFCSFLAQKPKVSENDFEDLLSNQGFSSRSDKKGPKTIAEMRKQDLAKDTDPLKLKLLDWIEGKERNIRALLSTLHTVLWDGESRWTPVGMADLVAPEQVKKHYRRAVLAVHPDKAAGQPYEQHAKMIFMELNDAWSEFENQGSRPLF

SEQ ID NO: 2120 - protein, 163 aa, Homo sapiens [sequence omitted]

SEQ ID NO: 2121 - protein, 123 aa, Homo sapiens
MGGSGQQKVILSSSRSLMSETRRAMLPLKALGVNPSLPLLASGGCWHSLACVHIIPFSSFILMWPSPLCVSVSSSLPMRMPLLLDLRFTLFQYDLFVMRSAVTLFSFLFFVMESCSVAQAGVQ

SEQ ID NO: 2122 - protein, 125 aa, Homo sapiens
MLFCFILFTHHKRCFFVCLFLFCFVLFFEIESFALITQAGVQWHDLSSLQPPPPGFKKLSCLSLLSWDYRHGTLRHYAWLIFVFLVEMVFHHVGQAGLKLLTSSDLPASAFQSAGITGVSHCTRI

SEQ ID NO: 2123 - protein, 166 aa, Homo sapiens
MSLHSSPTLPTSLYQSCDLSVGGPSLLTWVWRRERRCCKVFSVSHCLEAGPAKAWAHSCTGSPRGRTGWGSRACEALGKGMGLWGRGGMGFRSICTIRKVLRSFFLEGTLSSLSLFLDLGLELRMGRCAQGGTHQSTREGGYLGVSQGLCQCLQPTSRSLEFGEWG

SEQ ID NO: 2124 - protein, 108 aa, Homo sapiens
MVHSVSDSITGGRPQPYEHIFITPYSLTRKGRSFVHCSPPLNCSLTGSVSLSEIFLNSGKCFGDFGILECVFKDCISTTETLSLFLKGSVFRHPPLLSVLSILLLPSF

SEQ ID NO: 2125 - protein, 132 aa, Homo sapiens [sequence omitted]

SEQ ID NO: 2126 - protein, 253 aa, Homo sapiens
MERCRPDTAGSSLLSAPEGGRKESQGPPQCLFPPDSRAPEVEPTQLGLQAWGTGHFGQRPPEGQHWEGRGPASGALGWLPPSGDAPQDPSCPGPPSQPGPTSSPAGRAASGHASAAPVCSSCPPWASLPAAPGARPWRRLLAHRAARGTRVGSLGARLGLRGGAASWTGTLGGIPFPELRALGWVRRPHTITRPRQPWGAWAGAGRAVWEGTPNLLPRPASSCRQAAPRLPLGVRVHNLWEAAPRPGRPQCRV

SEQ ID NO: 2127 - protein, 211 aa, Homo sapiens
MQLGEHTHPQKNPKSLAGCLLPNPHPQLQLRGKRAAGLLLRRNPWCHPQAPGGSSTWAPSLPPILAPQAYLNFAPPTLVPGGSPGTEAQPVAPANALGSRSKLNLTQPSCLSSGSHLPLPFPAGMCPHPANPTWALRKGAEVPQGPPLSHTRKALCLAASGVGALLLEVPRHPGWGQQSAAGFQQVFQEGAGTHFPSVRVQPGRGKLQGQR

SEQ ID NO: 2128 - protein, 759 aa, Homo sapiens [sequence omitted]

SEQ ID NO: 2129 - protein, 591 aa, Homo sapiens [sequence omitted]

SEQ ID NO: 2130 - protein, 240 aa, Homo sapiens
MVTPSPAQLPLICCANIFLDEMLGRKIIRVLPPLSNFGLIKLSLSSAKIYSFPLNTGPVPGIDFLYDNTTHASTAMPSLAPPRGWDTEALVGLPLSPQHCPPPPRSLLATLTPPSLSWLLECLASVSSVFVLPRWLFWGSPSSQDGVEWIEEVWRVWPLRSPGTTGNGLQPQALGGPGFGGLSPSLAQEEGQGGGPGLLRGLRGHAMYVGWEHTCRGSNRSPAPKGLQDEGTSWLPGLRA

SEQ ID NO: 2131 - protein, 106 aa, Homo sapiens [sequence omitted]

SEQ ID NO: 2132 - protein, 347 aa, Homo sapiens
MSFVLSRMAACGGTCKNKVTVSKPVWDFLSKETPARLARLREEHRVSILIDGETSDIYVLQLSPQGPPPAPPNGLYLARKALKGLLKEAEKELKKAQRQGELMGCLALGGGGEHPEMHRAGPPPLRAAPLLPPGARGLPPPPPPLPPPLPPRLREEAEEQESTCPICLGEIQNAKTLEKCRHSFCEGCITRALQVKKACPMCGRFYGQLVGNQPQNGRMLVSKDATLLLPSYEKYGTIVIQYVFPPGVQGAEHPNPGVRYPGTTRVAYLPDCPEGNKVLTLFRKAFDQRLTFTIGTSMTTGRPNVITWNDIHHKTSCTGGPQLFGYPDPTYLTRVQEELRAKGITDD

SEQ ID NO: 2133 - protein, 143 aa, Homo sapiens [sequence omitted]

SEQ ID NO: 2134 - protein, 644 aa, Homo sapiens
MGNYLPAFGPRPPGRREALLSPDCPLLRLHPTGKLGQASCQADEFRCDNGKCLPGPWQCNTVDECGDGSDEGNCSAPASEPPGSLCPGGTFPCSGARSTRCLPVERRCDGLQDCGDGSDEAGCPDLACGRRLGSFYGSFASPDLFGAARGPSDLHCTWLVDTQDSRRVLLQLELRLGYDDYVQVYEGLGERGDRLLQTLSYRSNHRPVSLEAAQGRLTVAYHARARSAGHGFNATYQVKGYCLPWEQPCGSSSDSDGGSLGDQGCFSEPQRCDGWWHCASGRDEQGCPACPPDQYPCEGGGGLCYTPADRCNNQKSCPDGADEKNCFSCQPGTFHCGTNLCIFETWRCDGQEDCQDGSDEHGCLAAVPRKVITAALIGSLVCGLLLVIALGCAFKLYSLRTQEYRAFETQMTRLEAEFVRREAPPSYGQLIAQGLIPPVEDFPVYSASQASVLQNLRTAMRRQMRRHASRRGPSRRRLGRLWNRLFHRPRAPRGQIPLLTAARPSQTVLGDGFLQPAPGAAPDPPAPLMDTGSTRAAGDRPPSAPGRAPEVGPSGPPLPSGLRDPECRPVDKDRKVCREPLVDGPAPADAPREPCSAQDPHPQVSTASSTLGPHSPEPLGVCRNPPPPCSPMLEASDDEALLVC

SEQ ID NO: 2135 - protein, 204 aa, Homo sapiens
MQTPPHDSNINICNSVTVKFSPWSTYSSIRYFLLLLFCFFFFFLRWSLTLSPRLECKGTISAHCRLHLPGSSDPPASASQVAGAHHYWCPPQCPANFCTFSRNRVSVGQVGLELLTSCDAPALASQSAGITGVSHRTQPSIRYFVLFCFVFVFFEMEFCSCCPGWSAMATQPPLPVFKQFSCLSLLSSWDYRRLPPRLADFLYF

SEQ ID NO: 2136 - protein, 819 aa, Homo sapiens
MNATLQCLSNTELFAEYLALGQYRAGRPEPSPDPEQPAGRGAQGQGEVTEQLAHLVRALWTLEYTPQHSRDFKTIVSKNALQYRGNSQHDAQEFLLWLLDRVHEDLNHSVKQSGQPPLKPPSETDMMPEGPSFPVCSTFVQELFQAQYRSSLTCPHCQKQSNTFDPFLCISLPIPLPHTRPLYVTVVYQGKCSHCMRIGVAVPLSGTVARLREAVSMETKIPTDQIVLTEMYYDGFHRSFCDTDDLETVHESDCIFAFETPEIFRPEGILSQRGIHLNNNLNHLKFGLDYHRLSSPTQTAAKQGKMDSPTSRAGSDKIVLLVCNRACTGQQGKRFGLPFVLHLEKTIAWDLLQKEILEKMKYFLRPTVCIQVCPFSLRVVSVVGITYLLPQEEQPLCHPTVERALKSCGPGGTAHVKLVVEWDKETRDFLFVNTEDEYIPDAESVRLQRERHHQPQTCTLSQCFQLYTKEERLAPDDAWRCPHCKHLQQGSITLSLWTLPDVLIIHLKRFRQEGDRRMKLQNMVKFPLTGLDMTPHVVKRSQSSWSLPSHWSPWRRPYGLGRDPEDYIYDLYAVCNHHGTMQGGHYTAYCKNSVDGLWYCFDDSDVQQLSEDEVCTQTAYILFYQRRTAIPSWSANSSVAGSTSSSLCEHWVSRLPGSKPASVTSAASSRRTSLASLSESVEMTGERSEDDGGFSTRPFVRSVQRQSLSSRSSVTSPLAVNENCMRPSWSLSAKLQMRSNSPSRFSGDSPIHSSASTLEKIGEAADDKVSISCFGSLRNLSSSYQEPSDSHSRREHKAVGRALWLSWKACSKTNRTPAD

SEQ ID NO: 2137 - protein, 187 aa, Homo sapiens
MVMHSEDEPYKCKFCGKAFDNLHLYLTHERTHTGEKPYECNKCGKAFSCSSSIRKHARIHTGEKPYICKQCGKAFRYSSSIRNHENTHTGEKPCECKQCGKAFSYSSYFRIHERIHTGEQVYKCKECGKTFTYPSAFHKHKSTHTSQKLYECKECGKAFDCFSSFHSHEGVHTGEKPYECRTWKSLQ

SEQ ID NO: 2138 - protein, 130 aa, Homo sapiens [sequence omitted]

SEQ ID NO: 2139 - protein, 463 aa, Homo sapiens [sequence omitted]

SEQ ID NO: 2140 - protein, 119 aa, Homo sapiens
MGAGPRVGGGARSGYICLVPKCRDEAQPSPPFGAPHWWLRVRGDDRDPPEVYSWGLEGCGRGLGGHWGLARVGPMRGQSLACALTSLLCVTWETNGCPYSTASMPHAKHRPCSRDLGFE

SEQ ID NO: 2141 - protein, 716 aa, Homo sapiens
MMSIRQRREIRATEVSEDFPAQEENVKLENKLPSGCTSRRLWKILSLTIGGTIALCIGLLTSVYLATLHENDLWFSNIKEVEREISFRTECGLYYSYYKQMLQAPTLVQGFHGLIYDNKTESMKTINLLQRMNIYQEVFLSILYRVLPIQKYLEPVYFYIYTLFGLQAIYVTALYITSWLLSGTWLSGLLAAFWYVTNRIDTTRVEFTIPLRENWALPFFAIQIAAITYFLRPNLQPLSERLTLLAIFISTFLFSLTWQFNQFMMLMQALVLFTLDSLDMLPAVKATWLYGIQITSLLLVCILQFFNSMILGSLLISFNLSVFIARKLQKNLKTGSFLNRLGKLLLHLFMVLCLTLFLNNIIKKILNLKSDEHIFKFLKAKFGLGATRDFDANLYLCEEAFGLLPFNTFGRLSDTLLFYAYIFVLSITVIVAFVVAFHNLSDSTNQQSVGKMEKGTVDLKPETAYNLIHTILFGFLALSTMGMKYLWTSHMCVFASFGLCSPEIWELLLKSVHLYNPKRICIMRYSVPILILLYLCYKFWPGMMDELSELREFYDPDTVELMNWINSNTPRKAVFAGSMQLLAGVKLCTGRTLTNHPHYEDSSLRERTRAVYQIYAKRAPEEVHALLRSFGTDYVILEDSICYERRHRRGCRLRDLLDIANGHMMDGPGENDPDLKPADHPRFCEEIKRNLPPYVAYFTRVFQNKTFHVYKLSRNK

SEQ ID NO: 2142 - protein, 1006 aa, Homo sapiens
MFANVMNKMHTISVPYSVMKTCPLSWVQRVHAHKAKVALVKCRDLHWAMMAHRDQRDVSLSSLRMLIVTDGANPWSVSSCDAFLSLFQSHGLKPEAICPCATSAEAMTVAIRRPGVPGAPLPGRAILSMNGLSYGVIRVNTEDKNSALTVQDVGHVMPGGMMCIVKPDGPPQLCKTDEIGEICVSSRTGGMMYFGLAGVTKNTFEVIPVNSAGSPVGDVPFIRSGLLGFVGPGSLVFVVGKMDGLLMVSGRRHNADDIVATGLAVESIKTVYRGRIAVFSVSVFYDERIVVVAEQRPDASEEDSFQWMSRVLQAIDSIHQVGVYCLALVPANTLPKTPLGGIHISQTKQLFLEGSLHPCNILMCPHTCVTNLPKPRQKQPGVGPAPVMVGNLVAGKRIAQAAGRDLGQIEENDLVRKHQFLAEILQWRAQATPDHVLLMLLNAKGTTVCTASCLQLHKRAERIASVLGDKGHLNAGDNVVLLYPPGIELIAAFYGCLYAGCIPVTVRPPHAQNLTATLPTVRMIVDVSKAACILTSQTLMRLLRSREAAAAVDVKTWPTIIDTDDLPRKRLPQLYKPPTPEMLAYLDFSVSTTGMLTGVKMSHSAVNALCRAIKLQCELYSSRQIAICLDPYCGLGFALWCLCSVYSGHQSVLIPPMELENNLFLWLSTVNQYKIRDTFCSYSVMELCTKGLGNQVEVLKTRGINLSCVRTCVVVAEERPRVALQQSFSKLFKDIGLSPRAVSTTFGSRVNVAICLQGTSGPDPTTVYVDLKSLRHDRVRLVERGAPQSLLLSESGKILPGVKVVIVNPETKGPVGDSHLGEIWVNSPHTASGYYTIYDSETLQADHFNTRLSFGDAAQTLWARTGYLGFVRRTELTAATGERHDALYVVGALDETLELRGLRYHPIDIETSVSRIHRSIAECAVFTWTNLLVVVVELCGSEQEALDLVPLVTNVVLEEHYLIVGVVVVVDPGVIPINSRGEKQRMHLRDSFLADQLDPIYVAYNM

SEQ ID NO: 2143 - protein, 129 aa, Homo sapiens [sequence omitted]

SEQ ID NO: 2144 - protein, 112 aa, Homo sapiens [sequence omitted]

SEQ ID NO: 2145 - protein, 145 aa, Homo sapiens
MKFNPFVTSDRSKNRKRHFNAPSHVRRKIMSSPLSKELRQKYNVRSMPIRKDDEVQVVRGHYKGQQIGKVVQVYRKKYVIYIERVQREKANGTTVHVGIHPSKVVITRLKLDKDRKKILERKAKSRQVGKEKGKYKEELIEKMQE

SEQ ID NO: 2146 - protein, 134 aa, Homo sapiens [sequence omitted]

SEQ ID NO: 2147 - protein, 754 aa, Homo sapiens [sequence omitted]

SEQ ID NO: 2148 - protein, 114 aa, Homo sapiens [sequence omitted]

SEQ ID NO: 2149 - protein, 225 aa, Homo sapiens [sequence omitted]

SEQ ID NO: 2150 - protein, 205 aa, Homo sapiens
MHLQMREDMAKYRRMSGVRPQSFRDLETPPHWAAYDTGLELLGRQEAGLALPRLEEALQGSLAQMESCRADCEGPEEQQGAEEEEDGAASQGGLYEAIAGHWIQVLQCRQRCVGETATRPGRSFPVPDFLPNQLRRLHEAHAQVSLSGLHGNHHFTRTLICPPLAPVTSSGDGLPSALLLLTFLYFPPSCSSLNSPAKWAICPRL

SEQ ID NO: 2151 - protein, 167 aa, Homo sapiens
MFDFSFPTPASAGTRMGPASCGGRSLHLPQLRFSRVDATAVTDVPFQRMHAPHRAPEVFCSRSSRGAGRGHPTPTPRVRWALAGNQPRCCAQLLSGRRGSGAQLRAGWVRGPAVGNLFILLLGKEDGEEEGTVLSYSSMVHISNITGIVGTTVSKTKPALVLMELTF

SEQ ID NO: 2152 - protein, 104 aa, Homo sapiens [sequence omitted]

SEQ ID NO: 2153 - protein, 114 aa, Homo sapiens
MFTSKSNSVSPSPSLEQADSDALDISTKVQLYGVLWKRPFGRPSAKWSRRFFIIKESFLLYYSESEKKSFETNKYFNIHPKVRRPLPGPQQGRAQCGHQSLHLVRGGDCALALA

SEQ ID NO: 2154 - protein, 122 aa, Homo sapiens [sequence omitted]

SEQ ID NO: 2155 - protein, 140 aa, Homo sapiens
MAATGFSAPNGSCHGTSRTVNSDAPMSPELPKPHLPDQLVIVNETEADSKPSKNVARSAAVETASLSPSLVPARQPTISLLCEDTADTLSVESLTLVPPVDPHSLRSLTGMPPLSTPAAACTEPVGEEAACAEPVGTAED

SEQ ID NO: 2156 - protein, 149 aa, Homo sapiens [sequence omitted]

SEQ ID NO: 2157 - protein, 399 aa, Homo sapiens
MSRRDSESTRHDSETEDMLWDDLLHGPECRSSVTSDSEGAHVNTLHSGTKRDPKEDVFQQNHLFWLQNSSPSSDRVSAIIWEGNECKKMDMSVLEISGIIMSRVNAYQQGVGYQMLGNVVTIGLAFFPFLHRLFREKSLDQLKSISAEEILTLFCGAPPVTPIIVLSIINFFERLCLTWMFFFMMCVAERTYKQRFLFAKLFSHITSARKARKYEIPHFRLKKVENIKIWLSLRSYLKRRGPQRSVDVVVSSVFLLTLSIAFICCAQVLQGHKTFLNDAYNWEFLIWETALLLFLLRLASLGSKTNKKYSNVSILLTEQINLYLKMEKKPNKKEQLTLVNNVLKLSTKLLKELDTPFRLYGLTMNPLIYNITRVVILSAVSGVISDLLGFNIRLWKIKS

SEQ ID NO: 2158 - protein, 129 aa, Homo sapiens [sequence omitted]

SEQ ID NO: 2159 - protein, 952 aa, Homo sapiens [sequence omitted]

SEQ ID NO: 2160 - protein, 749 aa, Homo sapiens
MQRPSVSRAENYQLLWDTIASLKQCEQAMQHAFIPVNGTEIEYEFEEITLERGNSGLGFSIAGGTDNPHIGDDPGIFITKIIPGGAAAEDGRLRVNDCILRVNEVDVSEVSHSKAVEALKEAGSIVRLYVRRRRPILETVVEIKLFKGPKGLGFSIAGGVGNQHIPGDNSIYVTKIIDGGAAQKDGRLQVGDRLLMVNNYSLEEVTHEEAVAILKNTSEVVYLKVGKPTTIYMTDPYGPPDITHSYSPPMENHLLSGNNGTLEYKTSLPPISPGRYSPIPKHMLVDDDYTSHSQHSTATRQPSMTLQRAVSLEGEPRKVVLHKGSTGLGFNIVGGEDGEGIFVSFILAGGPADLSGELQRGDQILSVNGIDLRGASHEQAAAALKGAGQTVTIIAQYQPEDYARFEAKIHDLREQMMNHSMSSGSGSLRTNQKRSLYVRAMFDYDKSKDSGLPSQGLSFKYGDILHVINASDDEWWQARRVMLEGDSEEMGVIPSKRRVERKERARLKTVKFNAKPGVIDSKGDIPGLGDDGYGTKTLRGQEDLILSYEPVTRQEINYTRPVIILGPMKDRINDDLISEFPDKFGSCVPHTTRPKRDYEVDGRDYHFVISREQMEKDIQEHKFIEAGQYNDNLYGTSVQSVRFVAERGKHCILDVSGNAIKRLQVAQLYPIAIFIKPRSLEPLMEMNKRLTEEQAKKTYDRAIKLEQEFGEYFTAIVQGDTLEDIYNQCKLVIEEQSGPFIWIPSKEKL

SEQ ID NO: 2161 - protein, 304 aa, Homo sapiens
MQEWVVLEIYSPLISQQDFIQIRLREDLKPWEKSPILKISAPQPIPSNRIDTTSSASWVAGSFSPVSPPVVDLRTIMEIEESRQKCGATPKSHLGKTVSHGVKLSQKQRKMIALTTKENNSGMNSMETVLFTPSKAPKPVNAWASSLHSVSSKSFRDFLLEEKKSVTSHSSGDHVKKVSFKGIENSQAPKIVRCSTHGTPGPEGNHISDLPLLDSPNPWLSSSVTAPSMVAPVTFASIVEEELQQEAALIRSREKPLALIQIEEHAIQDLLVFYEAFGNPEEFVIVERTPQGPLAVPMWNKHGC

SEQ ID NO: 2162 - protein, 177 aa, Homo sapiens [sequence omitted]

SEQ ID NO: 2163 - protein, 170 aa, Homo sapiens [sequence omitted]

SEQ ID NO: 2164 - protein, 146 aa, Homo sapiens
MHFLGLPIIKYPKLGGRKQHTYSLPVLETGSLQSRCRQDCCLFEVPLGRTLLSPPDRPGSWWPLASISPSSLPPFSCGLLCLCLSRTPVVLDQGPTLLQLSSSFFFFFFFWRRSLALSPRLEFSGTISAHCKLCLPGSHHSPASAS

SEQ ID NO: 2165 - protein, 179 aa, Homo sapiens [sequence omitted]

SEQ ID NO: 2166 - protein, 756 aa, Homo sapiens
MEEELKCPVCGSLFREPIILPRSHNVCLPCARTIAVQTPDGEQHLPQPLLLSRGSGLQAGAAAAASLEHDAAAGPACGGAGGSAAGGLGGGAGGGGDHADKLSLYSETDSGYGSYTPSLKSPNGVRVLPMVPAPPGSSAAAARGAACSSLSSSSSSITCPQCHRSASLDHRGLRGFQRNRLLEAIVQRYQQGRGAVPGTSAAAAVAICQLCDRTPPEPAATLCEQCDVLYCSACQLKCHPSRGPFAKHRLVQPPPPPPPPAEAASGPTGTAQGAPSGGGGCKSPGGAGAGATGGSTARKFPTCPEHEMENYSMYCVSCRTPVCYLCLEEGRHAKHEVKPLGAMWKQHKAQLSQALNGVSDKAKEAKEFLVQLKNILQQIQENGLDYEACLVAQCDALVDALTRQKAKLLTKVTKEREHKLKMVWDQINHCTLKLRQSTGLMEYCLEVIKENDPSGFLQISDALIKRVQVSQEQWVKGALEPKVSAEFDLTLDSEPLLQAIHQLDFIQMKCRVPPVPLLQLEKCCTRNNSVTLAWRMPPFTHSPVDGYILELDDGAGGQFREVYVGKETLCTIDGLHFNSTYNARVKAFNSSGVGPYSKTVVLQTSDVAWFTFDPNSGHRDIILSNDNQTATCSSYDDRVVLGTAAFSKGVHYWELHVDRYDNHPDPAFGVARASVVKDVMLGKDDKAWAMYVDNNRSWFMHCNSHTNRTEGGVCKGATVGVLLDLNKHTLTFFINGQQQGPTAFRHQVQPSVTSLF

SEQ ID NO: 2167 - protein, 1246 aa, Homo sapiens
MVPAGDQDRAPHRGKPAQAGARTSRASRALRSWRRSQAARATVTHPRGGHDRGSHGGYREGHRGCRRDPQWASAGPPPLSFTEEVKFELRALKDWDFKMSVPDYMQCAEDHQTLLVVVQPVGIVSEENFFRIYKRICSVSQISVRDSQRVLYIRYRHHYPPENNEWGDFQTHRKVVGLITITDCFSAKDWPQTFEKFHVQKEIYGSTLYDSRLFVFGLQGEIVEQPRTDVAFYPNYEDCQTVEKRIEDFIESLFIVLESKRLDRATDKSGDKIPLLCVPFEKKDFVGLDTDSRHYKKRCQGRMRKHVGDLCLQAGMLQDSLVHYHMSVELLRSVNDFLWLGAALEGLCSASVIYHYPGGTGGKSGARRFQGSTLPAEAANRHRPGAQEVLIDPGALTTNGINPDTSTEIGRAKNCLSPEDIIDKYKEAISYYSKYKNAGVIELEACIKAVRVLAIQKRSMEASEFLQNAVYINLRQLSEEEKIQRYSILSELYELIGFHRKSAFFKRVAAMQCVAPSIAEPGWRACYKLLLETLPGYSLSLDPKDFSRGTHRGWAAVQMRLLHELVYASRRMGNPALSVRHLSFLLQTMLDFLSDQEKKDVAQSLENYTSKCPGTMEPIALPGGLTLPPVPFTKLPVVRHVKLLNLPASLRPHKMKSLLGQNVSTKSPFIYSPIIAHNRGEERNKKIDFQWVQGDVCEVQLMVYNPMPFELRVENMGLLTSGVEFESLPAALSLPAESGLYPVTLVGVPQTTGTITVNGYHTTVFGVFSDCLLDNLPGIKTSGSTVEVIPALPRLQISTSLPRSAHSLQPSSGDEISTNVSVQLYNGESQQLIIKLENIGMEPLEKLEVTSKVLTTKEKLYGDFLSWKLEETLAQFPLQPGKVATFTINIKVKLDFSCQENLLQDLSDDGISVSGFPLSSPFRQVVRPRVEGKPVNPPESNKAGDYSHVKTLEAVLNFKYSGGPGHTEGYYRNLSLGLHVEVEPSVFFTRVSTLPATSTRQCHLLLDVFNSTEHELTVSTRSSEALILHAGECQRMAIQVDKFNFESFPESPGEKGQFANPKQLEEERREARGLEIHSKLGICWRIPSLKRSGEASVEGLLNQLVLEHLQLAPLQWDVLVDGQPCDREAVAACQVGDPVRLEVRLTNRSPRSVGPFALTVVPFQDHQNGVHNYDLHDTVSFVGSSTFYLDAVQPSGQSACLGALLFLYTGDFFLHIRFHEDSTSKELPPSWFCLPSVHVCALEAQA

SEQ ID NO: 2168 - protein, 110 aa, Homo sapiens [sequence omitted]

SEQ ID NO: 2169 - protein, 120 aa, Homo sapiens [sequence omitted]

SEQ ID NO: 2170 - protein, 125 aa, Homo sapiens
MLAVAVASSRTLEVLDLEGTGLTNQSAQTLLDMVENYPTALRSLVLAENSISPELQQQICDLLSEGEEEEEVAGGAGDTQEWERGREPAAHQRGSSSWMCPSDPSSQMVLMTSGLGDSLLAETEM

SEQ ID NO: 2171 - protein, 164 aa, Homo sapiens [sequence omitted]

SEQ ID NO: 2172 - protein, 189 aa, Homo sapiens
MCAKRLRGPFRIFLPLRKYSFFPSQVAQPFASAAVAQALLSSPGTNLQQTLVGGLRLRHGSVGGAQWVVKAACPWEPQDVACCGGFTVTARIAACVLLCLCEHMYTPSAHARMTFGTEHLLLWPAQRRADPRTAAPIRLHQGQLDPSRDPENLRAWAVGSCRAGVELHGSPVHLHMRAGQHISMFAGVA

SEQ ID NO: 2173 - protein, 176 aa, Homo sapiens [sequence omitted]

SEQ ID NO: 2174 - protein, 101 aa, Homo sapiens
MWTRDSKRLATTPRHPAEKWWVGIQTQVWAMSWPSFLHCSARTSEKGFQYHISQESSTNDRVLICWQRLPSPRHLHSSFLYLLQSLSSHPLLPEAFPEHFI

SEQ ID NO: 2175 - protein, 137 aa, Homo sapiens [sequence omitted]

SEQ ID NO: 2176 - protein, 887 aa, Homo sapiens [sequence omitted]

SEQ ID NO: 2177 - protein, 188 aa, Homo sapiens [sequence omitted]

SEQ ID NO: 2178 - protein, 339 aa, Homo sapiens [sequence omitted]

SEQ ID NO: 2179 - protein, 195 aa, Homo sapiens
MAVCLWVSLSVCGCLSPSVGISLCLWVSLPSVGVHLCLWVSLFVSVSVCGCLCLWVSLCECPCECLCLWVSLLVCGYLSLSVGVSVGFPTCGSCRSVTLQTFRPQPASLQTAVAWGSRHALQGQMVVIAEILDPHVGEVPVEMSPGKLLPATSGPERLPGLHDVKVGHILICQLRVLGRWTFFLATVTPSLKRSS

SEQ ID NO: 2180 - protein, 556 aa, Homo sapiens
MPLVPEADAAQAGGHDAHPAGRDHRGHRDAHRHRRQHPQHHRRPHPPGQLRRAGTTALRAGSRVTIADGGVPGLQPEPYLAVYLHSEPRPNERNCSASRRIRPESLQGADHRPYTFFISPGTRDPVGSYRLNLSSHFRWSALEVSVGLYTSLCQYFSEEDVVWRTEGLLPLEETSPRQAVCLTRHLTAFGTSLFMPPSHVRFVFPEPTADVNYIVMLTCAVCLVTYMVMAAILHKLDQLDASRGCAIPFCGQRGRFKYEILVKTGWGRGSGTTAHVGIMLYGVDSRSGHRHLDGDRAFHRNSLDIFQIATPHSLGSMWKIRVWHDNKGLSPAWFLQHIIVRDLQTARSTFFLVNDWLSVETEANGGLVEKEVLAASHAALLRFRRLLVAELQRGFFDKHIWLSIWDRPPRSCFTRIQRATCCVLLICLFLGANAVWYGAVGDSAYSTGRVSRLNPLSVDTVAVGLVSSVVVYPVYLAILFLFRMSRSKVAGSPSPTPAGQQVLDVDSCLDSSVLDSSFLTFSGLHAEVRALLGVLPPWRSLDSRPCAPLSRPLLDR

SEQ ID NO: 2181 - protein, 339 aa, Homo sapiens
MNLYESFAQATQLGDLHTCLMMDMKACQEDDVRLLCHLTPSIYTEFPDETLRSGELLNMIVAVIDSAQLQELVCHVMMGNLVMFRKDSVLNILIQSLDWETFEQYCAWQLFLAHNIPLETIIPILQHLKYKEHPEALSCLLLQLRREKPSEEMVKMVLSRPCHPDDQFTTSILRHWCMKHDELLAEHIKSLLIKNNSLPRKRQSLRSSSSKLAQLTLEQILEHLDNLRLNLTNTKQNFFSQTPILQALQHVQASCDEAHKMKFSDLFSLAEEYEDSSTKPPKSRRKAALSSPRSRKNATQPPNAEEESGSSSASEEEDTKPKPTKRKRKGSSAVGSDSD

SEQ ID NO: 2182 - protein, 124 aa, Homo sapiens [sequence omitted]

SEQ ID NO: 2183 - protein, 932 aa, Homo sapiens
MTNLKSTAPHFVRCINPNVNKIPGILDPYLVLQQLCCNGVLEGTRICREGFPNRLQYADFKQRYCILNPRTFPKSKFVSSRKAAEELLGSLEIDHTQYRFGITKVFFKAGFLGQLEAIRDERLSKVFTLFQARAQGKLMRIKFQKILEERDALILIQWNIRAFMAVKNWPWMRLFFKIKPLVKSSEVGEEVAGLKEECAQLQKALEKSEFQREELKAKQVSLTQEKNDLILQLQAEQETLANVEEQCEWLIKSKIQLEARVTELSERVEEEEEINSELTARGRKLEDECFELKKEIDDLETMLVKSEKEKRTTEHKVKNLTEEVEFLNEDISKLNRAAKVVQEAHQQTLDDLHMEEEKLSSLSKANLKLEQQVDELEGALEQERKARMNCERELHKLEGNLKLNRESMENLESSQRHLAEELRKKELELSQMNSKVENEKGLVAQLQKTVKELQAQIKDLKEKLEAERTTRAKMERERADLTQDLADLNERLEEVGGSSLAQLEITKKQETKFQKLHRDMEEATLHFETTSASLKKRHADSLAELEGQVENLQQVKQKLEKDKSDLQLEVDDLLTRVEQMTRAKANAEKLCTLYEERLHEATAKLDKVTQLANDLAAQKTKLWSESGEFLRRLEEKEALINQLSREKSNFTRQIEDLRGQLEKETKSQSALAHALQKAQRDCDLLREQYEEEQEVKAELHRTLSKVNAEMVQWRMKYENNVIQRTEDLEDAKKELAIRLQEAAEAMGVANARNASLERARHQLQLELGDALSDLGKVRSAAARLDQKQLQSGKALADWKQKHEESQALLDASQKEVQALSTELLKLKNTYEESIVGQETLRRENKNLQEEISNLTNQVREGTKNLTEMEKVKKLIEEEKTEVQVTLEETEGALERNESKILHFQLELLEAKAELERKLSEKDEEIENFRYLR

SEQ ID NO: 2184 - protein, 108 aa, Homo sapiens [sequence omitted]

SEQ ID NO: 2185 - protein, 496 aa, Homo sapiens [sequence omitted]

SEQ ID NO: 2186 - protein, 969 aa, Homo sapiens [sequence omitted]

SEQ ID NO: 2187 - protein, 106 aa, Homo sapiens
MRLNTESAEAQAEPPFFREVGERISELGEKGSFVKYSQKTVFKFLSFCIMLDISSDHKLDSNINKQFCLYFVSGFSCQALWCVQTTSEVEAGGSLDPRSLSSAWVA

SEQ ID NO: 2188 - protein, 246 aa, Homo sapiens
MNSFDDEDAGDSRRLKGAIQRSTETGLAVEMPSRTLRQASHESIEDSMNSYGSEGNLNYGGVCLASDAQFSDFLGSMGPAQFVGRQTLATTPMGDVEIGLQERNGQLEVDIIQARGLTAKPGSKTLPAAYIKAYLLENGICIAKKKTKVARKSLDPLHNQVLLFPESPQGKVLQVIVWGNYGRMERKQFMGVARVLLEELDLTTLAVGWYKLFPTSSMVDPATGPLLRQASQLSLESTVGPCGERS

SEQ ID NO: 2189 - protein, 493 aa, Homo sapiens
MALSSWAQGTSWAAKGFSRSFSLAEFSLLKPRAGSCRTQEPRKPADGQPWLRCSPCTGGQRIWVHGAHPATSPPIRQKGKLRPRGRESFPQGHTAQESQLGAPPLTPCPVLLMPPGRLAVGVSEGGVAMGRWQGEAQPPLQTPHSQHSFLTPRPLASHPDMSTSLQEGQEDGPAGWRANLKPVDRRSPAERTLKPKEPRALAEPRAGEAPRKVSGSFAGSVHITLTPVRPDRTPRPASPGPSLPARSPSPPRRRRLAVPASLDVCDNWLRPEPPGQEARVQSWKEEEKKPHLQGKPGRPLSPANVPALPGETVTSPVRLHPDYLSPEEIQRQLQDIERRLDALELRGVELEKRLRAAEGDDAEDSLMVDWFWLIHEKQLLLRQESELMYKSKAQRLEEQQLDIEGELRRLMAKPEALKSLQERRREQELLEQYVSTVNDRSDIVDSLDEDRLREQEEDQMLRDMIEKLGLQRKKSKFRLSKIWSPKSKSSPSQ

SEQ ID NO: 2190 - protein, 195 aa, Homo sapiens
MPRPAPESPGRKSCTLGLQPHRGPSVCPRASPLRAWPALLPVTPCSSGLRTPHPPQHLRKPQKAAKSRSPQPLARPWLASGTFRPPSTGSVLPPAPRTVQPETPLPLSQPPGPTSPPRPQKGRRAQSPWGFPKARVPRPSRLLRYPMALPRKGLHPQAPNSCLVRQRRPNLPSSRGSPGVGAGRVPRWPPLPSSP

SEQ ID NO: 2191 - protein, 254 aa, Homo sapiens
MESLNPSWLTPPTPPRALSLRPTLLDTRGPRRPSVPQLPVPWRQPRSHDHAGDASPQAEAGFEAAGSRPPTPCPLGGTCAGGVGVAGFAHRPAPVPCCDSHEGRTWLSLHLPWTVPGLGRPGTAKGQSAQTSVDTPSACEPLGAARARLECRGGARTAAAPRCKQACRYKSWSPWASPHPSLTHLPELSKEARQSRIQHHAASTSALAQAAPPIRACTPRIDSLSTEDQDGGGLLLPDEEDGLGHGHVPIRQGH

SEQ ID NO: 2192 - protein, 291 aa, Homo sapiens
MGSFQLEDFAAGWIGGAASVIVGHPLDTVKTRLQAGVGYGNTLSCIRVVYRRESMFGFFKGMSFPLASIAVYNSVVFGVFSNTQRFLSQHRCGEPEASPPRTLSDLLLASMVAGVVSVGLGGPVDLIKIRLQMQTQPFRDANLGLKSRAVAPAEQPAYQGPVHCITTIVRNEGLAGLYRGASAMLLRDVPGYCLYFIPYVFLSEWITPEACTGPSPCAVWLAGGMAGKGSSSWSRTPVQATAVGQLGNCHALLSPGGGQDTFRYSPNNSLLGTYSVPGPLPPQSHPFPMQL

SEQ ID NO: 2193 - protein, 100 aa, Homo sapiens [sequence omitted]

SEQ ID NO: 2194 - protein, 120 aa, Homo sapiens
MLSISADIETVGETLKKIIPTLEEYHHYKGSNFDCELRLLTHQSLAGGIIEVKDAKIKELQGNTQTTIKLFRECCPHSTDGVVLIGERLWSCRVHKIILDLISESPTEDVHRLIIPIFMM

SEQ ID NO: 2195 - protein, 106 aa, Homo sapiens [sequence omitted]

SEQ ID NO: 2196 - protein, 235 aa, Homo sapiens
MAREKHQASQKENKQLSLKVDELERLEALGPISVLFLGPETFSHLAVFCLVCGSVEGLEALEGTRQTSEEKLLPFQWKLEATSAQNIEFLQVIAKREEAIHQSQLRLEEKTRECGTLARQLESAIEDARRQVEQTKEHALSKERAAQNKILDLETQLSRTKTELSQLRRSRDDADRRYQSRLQDLKDRLEQSESTNRSMQNYVQFLKSSYANVFGDGPYSTFLTSSPIRSRSPPA

SEQ ID NO: 2197 - protein, 181 aa, Homo sapiens
MTLPWPSPGPSLILPCPSMPWPCPHPALALHWSCPALALPWPWPCLLPGLAFALPWPDPRPTESMKWPWTCLAILCPGPILSPPCSGPALALALLLVLPLLWPCSVFGRALCYPSPALPWPWPYHGLLLPWPGPTLAFSTLALPFPGVALPWPCPALALALPYPGPGSALTLALVLSCPWL

SEQ ID NO: 2198 - protein, 126 aa, Homo sapiens [sequence omitted]

SEQ ID NO: 2199 - protein, 551 aa, Homo sapiens
MAAPVRLGRKRPLPACPNPLFVRWLTEWRDEATRSRHRTRFVFQKALRSLRRYPLPLRSGKEAKILQHFGDGLCRMLDERLQRHRTSGGDHAPDSPSGENSPAPQGRLAEVQDSSMPVPAQPKAGGSGSYWPARHSGARVILLVLYREHLNPNGHHFLTKEELLQRCAQKSPRVAPGSAPPWPALRSLLHRNLVLRTHQPARYSLTPEGLELAQKLAESEGLSLLNVGIGPKEPPGEETAVPGAASAELASEAGVQQQPLELRPGEYRVLLCVDIGETRGGGHRPELLRELQRLHVTHTVRKLHVGDFVWVAQETNPRDPANPGELVLDHIVERKRLDDLCSSIIDGRFREQKFRLKRCGLERRVYLVEEHGSVHNLSLPESTLLQAVTNTQVIDGFFVKRTADIKESAAYLALLTRGLQRLYQGHTLRSRPWGTPGNPESGAMTSPNPLCSLLTFSDFNAGAIKNKAQSVREVFARQLMQVRGVSGEKAAALVDRYSTPASLLAAYDACATPKEQETLLSTIKCGRLQRNLGPALSRTLSQLYCSYGPLT

SEQ ID NO: 2200 - protein, 696 aa, Homo sapiens
MSAHLAMIDTLMMAYTVEMVSIEKVIACAQQYSAFFQATDLPYDIEDAVMYWINKVNEHLKDIMEQEQKLKEHHTVEAPGGQKSPSKWFWKLVPARYRKEQTLLKQLPCIPLVENLLKDGTDGCALAALIHFYCPDVVRLEDICLKETMSLADSLYNLQLIQEFCQEYLNQCCHFTLEDMLYAASSIKSNYLVFMAELFWWFEVVKPSFVQPRVVRPQGAEPVKDMPSIPVLNAAKRNVLDSSSDFPSSGEGATFTQSHHHLPSRYSRPQAHSSASGGIRRSSSMSYVDGFIGTWPKEKRSSVHGVSFDISFDKEDSVQRSTPNRGITRSISNEGLTLNNSHVSKHIRKNLSFKPINGEEEAESIEEELNIDSHSDLKSCVPLNTNELNSNENIHYKLPNGALQNRILLDEFGNQIETPSIEEALQIIHDTEKSPHTPQPDQIANGFFLHSQEMSILNSNIKLNQSSPDNVTDTKGALSPITDNTEVDTGIHVPSEDIPETMDEDSSLRDYTVSLDSDMDDASKFLQDYDIRTGNTREALSPCPSTVSTKSQPGSSASSSSGVKMTSFAEQKFRKLNHTDGKSSGSSSQKTTPEGSELNIPHVVAWAQIPEETGLPQGRDTTQLLASEMVHLRMKLEEKRRAIEAQKKKMEAAFTKQRQKMGRTAFLTVVKKKGDGISPLREEAAGAEDEKVYTDR

SEQ ID NO: 2201 - protein, 159 aa, Homo sapiens [sequence omitted]

SEQ ID NO: 2202 - protein, 524 aa, Homo sapiens
MENLEEEVSQAENSLLQAAAAFPMYGRVHCITGALQKLSLNSLQLVSEWRPVVEKLLLMSYRLSTVVSPVIQSSSPEGLIPMDTDSESASRLQMILNEIQPRDTNDYFNQAKILKEHDSFDMKDLNASVVNIDTSTEIKGKEVKTCDVTAQMVLVCCWRSMKEVALLLGMLCQLLPMQPVPESSDGLLTVEQVKEIGDYFKQHLLQSRHRGAFELAYTGFVKLTEVLNRCPNVSLQKLPEQWLWSVLEEIKCSDPSSKLCATRRSAGIPFYIQALLASEPKKGRMDLLKITMKELISLAGPTDDIQSTVPQVHALNILRALFRDTRLGENIIPYVADGAKAAILGFTSPVWAVRNSSTLLFSALITRIFGVKRAKDEHSKTNRMTGREFFSRFPELYPFLLKQLETVANTVDRCGHSPVYHSREMAARALVPFVMIDHIPNTIRSLLSTLPSCTDQCFRQNHIHGTLLQVFHLLQAYSDSKHGTNSDFQHELTDITVCTKAKLWLAKSFTTCASLKIKYFCLFF

SEQ ID NO: 2203 - protein, 118 aa, Homo sapiens
MHPYDVKLGLIASCWWQSSEDEDWLSYWRAGPWTRHLLLRPDENGPGPLATRCHSQERWSKAMQCQLRFEKGVRSKCWKDSPSLSSLPSTQLQSRAEVTTHPEATVEETQHQALSTLS

SEQ ID NO: 2204 - protein, 158 aa, Homo sapiens [sequence omitted]

SEQ ID NO: 2205 - protein, 130 aa, Homo sapiens
MGALNSISLETNKSSFSMSWTPSVEHSSGTARTLRSCKLALVGFSSMSEFLFRASKTQPVTLFVPNVNSALCDQPVVRGVGIHEQRKRNISSLISVFNHWLPPLQLHLGRALICRFNSRGNFTCLMTAVK

SEQ ID NO: 2206 - protein, 160 aa, Homo sapiens
MASPAPLVASISHQMVALQTLQLLQQEWGWGDGPVAPGNPRDPDHVSTAPARRSGPPRARPGPGREERGGGVGTRSRRTAARVNSPEEEVVRGAEGGAELLPFPRDRGPCTLAQMAMRSALARVVDSTSELVSVEQTLLGPLQQERSFPIHLKLQLLANE

SEQ ID NO: 2207 - protein, 226 aa, Homo sapiens
MQAYNPLIHPAFSIMALFFSSKVQNHHDFSPTKKKKKRKRKLTLNHKSWLPNIGHNWVGEMYLVCLGGRGSFLPGDSFSEHTAILPMALSFTSPPERPASFFLFVCLSTAIMLLPGLWLLGTHSPFNMACSLQFSLSKCSQSPGLCAKGDSALAHRLWSECLCLPQINMLKFNHKCDGVIRWGLWDFIRSWRGSLIKKAALPPPSCKSPSVNQEMGPHQTPNLPVP

SEQ ID NO: 2208 - protein, 140 aa, Homo sapiens [sequence omitted]

SEQ ID NO: 2209 - protein, 630 aa, Homo sapiens [sequence omitted]

SEQ ID NO: 2210 - protein, 575 aa, Homo sapiens [sequence omitted]

SEQ ID NO: 2211 - protein, 509 aa, Homo sapiens [sequence omitted]

SEQ ID NO: 2212 - protein, 232 aa, Homo sapiens
MASPPGLELKTLSNGPQAPRRSAPLGPVAPTREGVENACFSSEEHETHFQNPGNTRLGSSPSPPGGVSSLPRSQRDDLSLHSEEGPALEPVSRPVDYGFVSALVFLVSGILLVVTAYAIPREARVNPDTVTAREMERLEMYYARLGSHLDRCIIAGLGLLTVGGMLLSVLLMVSLCKGELYRRRTFVPGKGSRKTYGSINLRMRQLNGDGGQALVENEVVQVSETSHTLQRS

SEQ ID NO: 2213 - protein, 190 aa, Homo sapiens
MSVGPSPFSRGPGRGLGWGPSFADACLSVLPCLPCPHLLFHCHFCVCLRMLSGYHPIHLCLLPGPLSLALILLCLLGCLSLHSPVLAFRSPFLSSGLLCVTSVSTSGPWLPSWSHLFSPYPCFSLPVISGAGLCPSIPVSISVLGPACSHFPLILAPLPAPPTSPLAPLPFFLAGSARGPNCGDTMAHGF

SEQ ID NO: 2214 - protein, 107 aa, Homo sapiens
MFSAHCNLRLPGSGDSPALASQVAGIAGVRHHAWLIFVFLVETGFHRVGRAGLELLTSGDPPASASRGAGVTGVSHCAQPLNALQYRDAILDCLLLGGRAGEGEILL

SEQ ID NO: 2215 - protein, 219 aa, Homo sapiens [sequence omitted]

SEQ ID NO: 2216 - protein, 177 aa, Homo sapiens
MRRFILERNPTNVKNMAKLSPIPHTLLGIRKFMLERNHTSVINVAQPLFYPQPLVNMRRFILERNSTNVKNVAKPSTIFHTLLYIRQFILERNAINGIKTFTWSSSPHKHRRTHTGEKPYKCEECGKAFTASSTLSEYKTIHTGEKPYKCEECGKAFNWSSDFNKHKRIHSGQKPIL

SEQ ID NO: 2217 - protein, 158 aa, Homo sapiens [sequence omitted]

SEQ ID NO: 2218 - protein, 172 aa, Homo sapiens
MPRASCCHCLCGPESWTCPSDSGVAAWAGSVTLGCYTFWELDRSGCLGGLWHPGMLYILGTGQEWLLGWALAPWDVIHSGNCNQPLEKSELQEVTLGWDLGTWPGQHGDTRLQQELWSVLGSLGAGLRPWAGFLQAEVLGKWGSQASCRLPHYVASDSSSLMKAIWFITLKL

SEQ ID NO: 2219 - protein, 141 aa, Homo sapiens
MARGTPFSPTPSSGSAPELRSMHRNAAGSELSERGLRETEATRECRGEEAGGLASQFRALRASRGRSGGCRPSPALGSGRGSQTSLPSGPGMPAPQSSQRNPANRGAQQSRGGRHQQPTCSVEGTLPSIAATADARRSSSR

SEQ ID NO: 2220 - protein, 707 aa, Homo sapiens
MAAAVAAAGRLGWLFAALCLGNAAGEAAPGPRVLGFCLEEDGAAGAGWVRGGAARDTPDATFLLRLFGPGFANSSWSWVAPEGAGCREEAASPAGEWRALLRLRLRAEAVRPHSALLAVRVEPGGGAAEEAAPPWALGLGAAGLLALAALARGLQLSALALAPAEVQVLRESGSEAERAAARRLEPARRWAGCALGALLLLASLAQAALAVLLYRAAGQRAVPAVLGSAGLVFLVGEVVPAAVSGRWTLALAPRALGLSRLAVLLTLPVALPVGQLLELAARPGRLRERVLELARGGGDPYSDLSKGVLRCRTVEDVLTPLEDCFMLDASTVLDFGVLASIMQSGHTRIPVYEEERSNIVDMLYLKDLAFVDPEDCTPLSTITRFYNHPLHFVFNDTKLDAVLEEFKRGKSHLAIVQKVNNEGEGDPFYEVLGLVTLEDVIEEIIRSEILDESEDYRDTVVKRKPASLMAPLKRKEEFSLFKVSDDEYKVTISPQLLLATQRFLSREVDVFSPLRISEKVLLHLLKHPSVNQEVRFDESNRLATHHYLYQRSQPVDYFILILQGRVEVEIGKEGLKFENGAFTYYGVSALTVPSSVHQSPVSSLQPIRHDLQPDPGDGTHSSAYCPDYTVRALSDLQLIKVTRLQYLNALLATRAQNLPQSPENTDLQVIPGSQTRLLGEKTTTAAGSSHSRPGVPVEGSPGRNPGV

SEQ ID NO: 2221 - protein, 339 aa, Homo sapiens [sequence omitted]

SEQ ID NO: 2222 - protein, 136 aa, Homo sapiens
MVRGWPGSISHGCSLNCIQLLIVTHMSTGLTHFSSVSHSTTKEHHTQDSGESHRLEEPGAWPHLGLISSVGCRSCARSSWVLASCCMRRKWRAAPISSTVTMAGWVSSRRVTCEQSPGLRVIEVPNVRGLAGSYQG

SEQ ID NO: 2223 - protein, 1101 aa, Homo sapiens [sequence omitted]

SEQ ID NO: 2224 - protein, 237 aa, Homo sapiens
MPVHPAWLGSACLPHASHGPAPQSSVGGLLVSVKSPPGDVHAARACAPGRHSGEGPPQGNLSPSCPAEAGHGCASTGRQVGVSGAGSSPSGPAPCVKCSAWVGTCFPLSLLQAAGGPAGSPNGFCPEPWAPDHAPTLHGLNKSLCQGPRSGGAQRKPRAHTGEGVSVLGLTQPRLSSSLRISWHLLACVATQVGCACRLTEKTLGEDYVSAFLPSTGPSWAHCDQTMCKSTRESGRS

SEQ ID NO: 2225 - protein, 216 aa, Homo sapiens
MLIAKTMGKMSPRACQRSSWLPLQYRPGGLRGKNGFMGQSQSPAANCILGTWCPASQPLQLQLWLWLKGANVQLGPWLQRVQATSLGGFHMVLGLWVHKRQEKRFGSLHLDFRGCMEMPGCPGRTPLQGQSPHGDPLLGQCRGGNVGLEPSQRVSTRALPNGAVGRGPSSSRPHKGGSTDSLHCVPAKVAGTQCQPIKAAVGAVSCRAMGQSCQRP

SEQ ID NO: 2226 - protein, 854 aa, Homo sapiens
MTLISPIILKKYGIPFSRITQEAGEFMITFPYGYHAGFNHGFNCAESTNFATLRWIDYGKVATQCTCRKDMVKISMDVFVRILQPERYELWKQGKDLTVLDHTRPTALTSPELSSWSASRASLKAKLLRRSHRKRSQPKKPKPEDPKFPGEGTAGAALLEEAGGSVKEEAGPEVDPEEEEEEPQPLPHGREAEGAEEDGRGKLRPTKAKSERKKKSFGLLPPQLPPPPAHFPSEEALWLPSPLEPPVLGPGPAAMEESPLPAPLNVVPPEVPSEELEAKPRPIIPMLYVVPRPGKAAFNQEHVSCQQAFEHFAQKGPTWKEPVSPMELTGPEDGAASSGAGRMETKARAGEGQAPSTFSKLKMEIKKSRRHPLGRPPTRSPLSVVKQEASSDEEASPFSGEEDVSDPDALRPLLSLQWKNRAASFQAERKFNAAAARTEPYCAICTLFYPYCQALQTEKEAPIASLGEGCPATLPSKSRQKTRPLIPEMCFTSGGENTEPLPANSYIGDDGTSPLIACGKCCLQVHASCYGIRPELVNEGWTCSRCAAHAWTAECCLCNLRGGALQMTTDRRWIHVICAIAVPEARFLNVIERHPVDISAIPEQRWKLKCVYCRKRMKKVSGACIQCSYEHCSTSFHVTCAHAAGVLMEPDDWPYVVSITCLKHKSGGHAVQLLRAVSLGQVVITKNRNGLYYRCRVIGAASQTCYEVNFDDGSYSDNLYPESITSRDCVQLGPPSEGELVELRWTDGNLYKAKFISSVTSHIYQVEFEDGSQLTVKRGDIFTLEEELPKRVRSRLSLSTGAPQEPAFSGEEAKAAKRPRVGTPLATEDSGRSQDYVAFVESLLQVQGRPGAPF

SEQ ID NO: 2227 - protein, 165 aa, Homo sapiens [sequence omitted]

SEQ ID NO: 2228 - protein, 113 aa, Homo sapiens
MAHSAAAVPLGALEQGCPIRVEHDRRRRQFTVRLNGCHDRAVLLYEYVGKRIVDLQHTEVPDAYRGRGIAKHLAKAALDFVVEEDLKAHLTCWYIQKYVKENPLPQYLERLQP

SEQ ID NO: 2229 - protein, 154 aa, Homo sapiens [sequence omitted]

SEQ ID NO: 2230 - protein, 131 aa, Homo sapiens
MPGEHIEGHPQEGDDPAPTGLAASSDHEAQGVSPGPHLSAGKVHLGQLPLHSSPAPLCVGPATPAKEQRPHLPQAHLAPTSSPAATGAGRWWAFLFRQGACGPGRWLDLHWCLVGRSVGWNHAPVFPQTRG

SEQ ID NO: 2231 - protein, 439 aa, Homo sapiens [sequence omitted]

SEQ ID NO: 2232 - protein, 115 aa, Homo sapiens
MSSPSSPFREQSFLCAAGDAGEESRVQVLKNEVRRGSPVLLGWVEQAYADKCVCGPSAPPAPTPPSLSQRVMCNDLFKVNPFQLQQFRADPSTASLLLCPGGLDHKLNLRGKAWG

SEQ ID NO: 2233 - protein, 139 aa, Homo sapiens
MAAGSSGASMGWRGSPGRPSGRSQHRPRTSSACARWARYGGSFQGFYPNSTYFYLFSLELFCLYLSFICKNSIRKIHRVNAHQAYRRSGRNMFSPAHFQSVFEHRGFHGFDSFHKRLVLSVFTIYVSETINYIIFMFTH

SEQ ID NO: 2234 - protein, 817 aa, Homo sapiens
MSSVSEVNVDIKDFLMSINLEQYLLHFHESGFTTVKDCAAINDSLLQKIGISPTGHRRRILKQLQIILSKMQDIPIYANVHKTKKNDDPSKDYHVPSSDQNICIELSNSGSVQTSSPPQLETVRKNLEDSDASVERSQYPQSDDKLSPPKRDFPTAEEPHLNLGSLNDSLFGSDNIKIESLITKKTVDHTVEEQQTEKVKLITENLSKLPNADSECLSFVGCSTSGTNSGNGTNGLLEGSPPSPFFKFQGEMIVNDLYVPSSPILAPVRSRSKLVSRPSRSFLLRHRPVPEIPGSTKGVSGSYFRERRNVATSTEKSVAWQNSNEENSSSIFPYGETFLFQRLENSKKRSIKNEFLTQGEALKGEAATATNSFIIKSSIYDNRKEKISEDKVEDIWIPREDKNNFLIDTASESEYSTVEECFQSLRRKNSKASKSRTQKALILDSVNRHSYPLSSTSGNADSSAVSSQAISPYACFYGASAKKVKSGWLDKLSPQGKRMFQKRWVKFDGLSISYYNNEKEMYSKGIIPLSAISTVRVQGDNKFEVVTTQRTFVFRVEKEEERNDWISILLNALKSQSLTSQSQAVVTPEKCGYLELRGYKAKIFTVLSGNSVWLCKNEQDFKSGLGITIIPMNVANVKQVDRTVKQSFEIITPYRSFSFTAETEKEKQDWIEAVQQSIAETLSDYEVAEKIWFNESNRSCADCKAPDPDWASINLCVVICKKCAGQHRSLGPKDSKVRSLKMDASIWSNELIELFIVIGSKRANDFWAGNLQKDEELHMDSPVEKRKNFITQKYKEGKFRKTLLASLTKEELNKVFN

SEQ ID NO: 2235 - protein, 131 aa, Homo sapiens
MEQQDKEDDTAFNLRSRSLPRPCDGVLGRKRQGQSAWGLHPGPAPSTCVCRPLPAPPTPQRRCSQGEGRRVLELQLPRVPEDPGLGPAPQPEVPRASKDPENHHLTGPQSSPKIPRVPEDSEPPLIGSQSP

SEQ ID NO: 2236 - protein, 196 aa, Homo sapiens [sequence omitted]

SEQ ID NO: 2237 - protein, 101 aa, Homo sapiens [sequence omitted]

SEQ ID NO: 2238 - protein, 750 aa, Homo sapiens
MSSSPVNVKKLKVSELKEELKKRRLSDKGLKAELMERLQAALDDEEAGGRPAMEPGNGDDQGFQEGEDELGDEEEGAGDENGHGEQQPQPPATQQQQPQQQRGAAKEAAGKSSGPTSLFAVTVAPPGARQGQQQAGGKKKAEGGGGGGRPGAPAAGDGKTEQKGGDKKRGVKRPREDHGRGYFEYIEENKYSRAKSPQPPVEEEDEHFDDTVVCLDTYNCDLHFKISRDRLSASSLTMESFAFLWAGGRASYGVSKGKVCFEMKVTEKIPVRHLYTKDIDIHEVRIGWSLTTSGMLLGEEEFSYGYSLKGIKTCNCETEDYGEKFDENDVITCFANFESDEVELSYAKNGQDLGVAFKISKEVLAGRPLFPHVLCHNCAVEFNFGQKEKPYFPIPEEYTFIQNVPLEDRVRGPKGPEEKKDCEVVMMIGLPGAGKTTWVTKHAAENPGKYNILGTNTIMDKMMVAGFKKQMADTGKLNTLLQRAPQCLGKFIEIAARKKRNFILDQTNVSAAAQRRKMCLFAGFQRKAVVVCPKDEDYKQRTQKKAEVEGKDLPEHAVLKMKGNFTLPEVAECFDEITYVELQKEEAQKLLEQYKEESKKALPPEKKQNTGSKKSNKNKSGKNQFNRGGGHRGRGGFNMRGGNFRGGAPGNRGGYNRRGNMPQRGGGGGGSGGIGYPYPRAPVFPGRGSYSNRGNYNRGGMPNRGNYNQNFRGRGNNRGYKNQSQGYNQWQQGQFWGQKPWSQHYHQGYY

SEQ ID NO: 2239 - protein, 453 aa, Homo sapiens
MYVGLTPDKRFLPGHLGMGLVEGYDSMGYEMSKPDLRAELEADLKLICDGKKDKFVVLRQQVQKYKQVFIEAVAKAKKLDEALAQYFGNGTELAQQEDIYPAMPEPIRKCPQCNKDMVLKTKKNGGFYLSCMGFPECRSAVWLPDSVLEASRDSSVCPVCQPHPVYRLKLKFKRGSLPPTMPLEFVCCIGGCDDTLREILDLRFSGGPPRASQPSGRLQANQSLNRMDNSQHPQPADSRQTGSSKALAQTLPPPTAAGESNSVTCNCGQEAVLLTVRKEGPNRGRQFFKCNGGSCNFFLWADSPNPGAGGPPALAYRPLGASLGCPPGPGIHLGGFGNPGDGSGSGTSCLCSQPSVTRTVQKDGPNKGRQFHTCAKPREQQCGFFQWVDENTAPGTSGAPSWTGDRGRTLESEARSKRPRASSSDMGSTAKKPRKCSLCHQPGHTRPFCPQNR

SEQ ID NO: 2240 - protein, 283 aa, Homo sapiens [sequence omitted]

SEQ ID NO: 2241 - protein, 743 aa, Homo sapiens
MESRPPVLSLSPIFLYTCEMFQDPVAFEDVAVNFTQEEWTLLDISQKNLFREVMLETFRNLTSIGKKWSDQNIEYEYQNPRRSFRSLIEEKVNEIKEDSHCGETFTQVPDDRLNFQEKKASPEVKSCDSFVCAEVGIGNSSFNMSIRGDTGHKAYEYQEYGPKPYKCQQPKNKKAFRYRPSIRTQERDHTGEKPYACKVCGKTFIFHSSIRRHMVMHSGDGTYKCKFCGKAFHSFSLYLIHERTHTGEKPYECKQCGKSFTYSATLQIHERTHTGEKPYECSKCDKAFHSSSSYHRHERSHMGEKPYQCKECGKAFAYTSSLRRHERTHSGKKPYECKQYGEGLSYLISFQTHIRMNSGERPYKCKICGKGFYSAKSFQTHEKTHTGEKRYKCKQCGKAFNLSSSFRYHERIHTGEKPYECKQCGKAFRSASQLRVHGGTHTGEKPYECKECGKAFRSTSHLRVHGRTHTGEKPYECKECGKAFRYVKHLQIHERTEKHIRMPSGERPYKCSICEKGFYSAKSFQTHEKTHTGEKPYECNQCGKAFRCCNSLRYHERTHTGEKPYECKQCGKAFRSASHLRMHERTHTGEKPYECKQCGKAFSCASNLRKHGRTHTGEKPYECKQCGKAFRSASNLQMHERTHTGEKPYECKECEKAFCKFSSFQIHERKHRGEKPYECKHCGNGFTSAKILQIHARTHIGEKHYECKECGKAFNYFSSLHIHARTHMGEKPYECKDCGKAFS

SEQ ID NO: 2242 - protein, 487 aa, Homo sapiens
MEPPANQEEAPTEPPGPPVEPELSPSEQEQPAQPSGEVESSPAQQETPAQPPEHHEVTVSPPGHHQTQHSDLPNVSVKPPDMQLTIATEPSAEVGTSPVHQEATAQLSGPGNDVEPPTIQHGGPPLPPESPEDAGPLAIQQETSVQSPEPINNENPSPTQQEAAAEHPQTAEKGKSSLTQQEAPAETPELPNVVVAQSPEHSNLTQATVQPLDLGLTITPESTTEVELSPTMQETPTHPPKKVVPQLPVYQEVTIPTPGQDQAQHPMSPSITVQPLDLGLTITPEPTTEVGHSTPLKKNVVPPKHPKVTLPHPDQVQTQHSNLTQATVQPLDLGLTTTPESTTEIEPSAALTTTAPPPEHPEVTLPPSDKGRAQHSNLTQVTLPPLDLELTITTEPTTEVKPSPTTEETSTQPPDLGLAITPEPTTETGHSTALEKTTAPHPDQVQTLHRKLTEVTGPPTELEPTQDSLVQSESYAQNKALTAPEEQ

SEQ ID NO: 2243 - protein, 605 aa, Homo sapiens
MDKRVKKLPLMALSTTMAESFKELDPDSSMGKALEMSCAIQNQLARILAEFEMTLERDVLQPLSRLSEEELPAILKHKKSLQKLVSDWNTLKSRLSQATKNSGSSQGLGGSPGSHSHTTMANKVETLKEEEEELKRKVEQCRDEYLADLYHFVTKEDSYANYFIRLLEIQADYHRRSLSSLDTALAELRENHGQADHSPSMTATHFPRVYGVSLATHLQELGREIALPIEACVMMLLSEGMKEEGLFRLAAGASVLKRLKQTMASDPHSLEEFCSDPHAVAGALKSYLRELPEPLMTFDLYDDWMRAASLKEPGARLQALQEVCSRLPPENLSNLRYLMKFLARLAEEQEVNKMTPSNIAIVLGPNLLWPPEKEGDQAQLDAASVSSIQVVGVVEALIQSADTLFPGDINFNVSGLFSAVTLQDTVSDRLASEELPSTAVPTPATTPAPAPAPAPAPAPALASAATKERTESEVPPRPASPKVTRSPPETAAPVEDMARRSTGSLAAAVETASGRQALVVGKPSPYMFECITENFSIDPARTLMVGDRLETDILFGHRCGMTTVLTLTGVSRLEEAQAYLAAGQHDLVPHYYVESIADLTEGLED

SEQ ID NO: 2244 - protein, 701 aa, Homo sapiens
MVFLGRINEVEPAKGLAESLAPTERSVKSLDMEEKDYSEADGLSERTTPSKAQKSPQKIAKKYKSAICRVTLLDASEYECEVEKHGRGQVLFDLVCEHLNLLEKDYFGLTFCDADSQKNWLDPSKEIKKQIRSSPWNFAFTVKFYPPDPAQLTEDITRYYLCLQLRADIITGRLPCSFVTHALLGSYAVQAELGDYDAEEHVGNYVSELRFAPNQTRELEERIMELHKTYRGMTPGEAEIHFLENAKKLSMYGVDLHHAKDSEGIDIMLGVCANGLLIYRDRLRINRFAWPKILKISYKRSNFYIKIRPGEYEQFESTIGFKLPNHRSAKRLWKVCIEHHTFFRLVSPEPPPKGFLVMGSKFRYSGRTQAQTRQASALIDRPAPFFERSSSKRYTMSRSLDGAEFSRPASVSENHDAGPDGDKRDEDGESGGQRSEAEEGEVRTPTKIKELKFLDKPEDVLLKHQASINELKRTLKEPNSKLIHRDRDWERERRLPSSPASPSPKGTPEKANEPVKTETMTVSSLAIRKKIEPEAVLQTRVSAMDNTQQVDGSASVGREFIATTPSITTETISTTMENSLKSGKGAAAMIPGPQTVATEIRSLSPIIGKDVLTSTYGATAETLSTSTTTHVTKTVKGGFSETRIEKRIIITGDEDVDQDQALALAIKEAKLQHPDMLVTKAVVYRETDPSPEERDKKPQES

SEQ ID NO: 2245 - protein, 1040 aa, Homo sapiens [sequence omitted]

SEQ ID NO: 2246 - protein, 1113 aa, Homo sapiens
MEPLLLGRGLIVYLMFLLLKFSKAIEIPSSVQQVPTIIKQSKVQVAFPFDEYFQIECEAKGNPEPTFSWTKDGNPFYFTDHRIIPSNNSGTFRIPNEGHISHFQGKYRCFASNKLGIAMSEEIEFIVPSVPKFPKEKIDPLEVEEGDPIVLPCNPPKGLPPLHIYWMNIELEHIEQDERVYMSQKGDLYFANVEEKDSRNDYCCFAAFPRLRTIVQKMPMKLTVNSSNSIKQRKPKLLLPPTESGSESSITILKGEILLLECFAEGLPTPQVDWNKIGGDLPKGREAKENYGKTLKIENVSYQDKGNYRCTASNFLGTATHDFHVIVEEPPRWTKKPQSAVYSTGSNGILLCEAEGEPQPTIKWRVNGSPVDNHPFAGDVVFPREISFTNLQPNHTAVYQCEASNVHGTILANANIDVVDVRPLIQTKDGENYATVVGYSAFLHCEFFASPEAVVSWQKVEEVKPLEGRRYHIYENGTLQINRTTEEDAGSYSCWVENAIGKTAVTANLDIRNATKLRVSPKNPRIPKLHMLELHCESKCDSHLKHSLKLSWSKDGEAFEINGTEDGRIIIDGANLTISNVTLEDQGIYCCSAHTALDSAADITQVTVLDVPDPPENLHLSERQNRSVRLTWEAGADHNSNISEYIVEFEGNKEEPGRWEELTRVQGKKTTVILPLAPFVRYQFRVIAVNEVGRSQPSQPSDHHETPPAAPDRNPQNIRVQASQPKEMIIKWEPLKSMEQNGPGLEYRVTWKPQGAPVEWEEETVTNHTLRVMTPAVYAPYDVKVQAINQLGSGPDPQSVTLYSGEDYPDTAPVIHGVDVINSTLVKVTWSTVPKDRVHGRLKGYQINWWKTKSLLDGRTHPKEVNILRFSGQRNSGMVPSLDAFSEFHLTVLAYNSKGAGPESEPYIFQTPEGVPEQPTFLKVIKVDKDTATLSWGLPKKLNGNLTGYLLQYQIINDTYEIGELNDINITTPSKPSWHLSNLNATTKYKFYLRACTSQGCGKPITEESSTLGEGSKGIGKISGVNLTQKTHPVEVFEPGAEHIVRLMTKNWGDNDSIFQDVIETRGREYAGLYDDISTQGWFIGLMCAIALLTLLLLTVCFVKRNRGGKYSV

SEQ ID NO: 2247 - protein, 109 aa, Homo sapiens
MLLLTVLLFCGCCNKLLQTRSLKAIEIYSLTLLEARSPKSRCWLSHIPSGGSLGEKSVPCLFQFLLCMGHSLTCGCLTPVSASVVIIAFFSVLCLLFCVSQISLSAFFF

SEQ ID NO: 2248 - protein, 458 aa, Homo sapiens
MATSMAAASGRFESAKSIEERKEQTRNARAEVLRQAKANFEKEERRKELKRLRGEDTWMLPDVNERIEQFSQEHSVKKKKKKDKHSKKAKKEKKKKSKKQKYEKNNESSDSSSSSEDEWVEAVPSQTPDKEKAWKVKDEKSGKDDTQIIKRDEWMTVDFMSVKTVSSSSLKAEKETMRKIEQEKNQALEQSKLMERELNPYWKDGGTGLPPEDCSVSSITKVSVVEDGGLSWLRKSYLRMKEQAEKQSRNFEDIVAERYGSMEIFQSKLEDAEKAASTKEDYRRERWRKPTYSDKAQNCQESRESDLVKYGNSSRDRYATTDTAKNSNNEKFIGDEKDKRPGSLETCRRESNPRQNQEFSFGNLRAKFLRPSDDEELSFHSKGRKFEPLSSSSALVAQGSLCSGFRKPTKNSEERLTSWSRSDGRGDKKHSNQKPSETVLMNTNMFQKTQEKNHKMKS

SEQ ID NO: 2249 - protein, 362 aa, Homo sapiens [sequence omitted]

SEQ ID NO: 2250 - protein, 442 aa, Homo sapiens
MPASGAPTPSRHVSLPTLAGYEETLTRLAAILAKHFADARIVGTDIRDSLMQALASYVCYPHSLRAVERIPEEQRIAMVRNLLAPYEQRPWAQTNWILVRLWRGCGFGYRYTRLPHLLKTKLEDANLPSLQKPCPSTLLQQHMADLLQQGPDVAPSFLNSVLNQLNWAFSEFIGMIQEIQQAAERLERNFVDSRQLKVCATCFDLSVSLLRVLEMTITLVPEIFLDWTRPTSEMLLRRLAQLLNQVLNRVTAERNLFDRVVTLRLPGLESVDHYPILVAVTGILVQLLVRGPASEREQATSVLLADPCFQLRSICYLLGQPEPPAPGTALPAPDRKRFSLQSYADYISADELAQVEQMLAHLTSASAQAAAASLPTSEEDLCPICYAHPISAVFQPCGHKSCKACINQHLMNNKDCFFCKTTIVSVEDWEKGANTSTTSSAA

SEQ ID NO: 2251 - protein, 175 aa, Homo sapiens
MHAHIHTCTHTHTHAHIRTCIHTCTDTHTHMHTHTLTYTHIHMHTHTQTHIYTQAHIHSCTQINIYTYAYTLTCTQTHTHICTHAHTLTYTHIHTCTYKRTYIQGHIHTHMHTYTCTCTHTHKHIHAHIHIHTHTHIYTHTDAYTHMDTYTHTYPHTHICIHSHTHAHTYTHIRT

SEQ ID NO: 2252 - protein, 236 aa, Homo sapiens
MCAQASPCRPQARALEDTHRGLCLHFHFLVEHPLPGAWAELRDSCHPHLAKEGARAQRSGVATSQGSTPPWCRSSLCIWPQATCFLAPPPHRGFLPLLWLFLFPSIPPLSPFSDRSMANLSVLFGQVVRGLSAGARVFEYMALNPCIPLSGGCCVPKEQLRGSVTFQNVCFRSARLPLPPRLRGAERLHPDAAPWQDRGPRGPVWRRKDHRGFPAGALLRPHGRRGDAGWAGPAHP

SEQ ID NO: 2253 - protein, 1162 aa, Homo sapiens
MQSSALVESLITVKMAAENSEEGNTCIIPQRNLFKALSEEAWNSGFMGNSSRTADKENTLQCPKTPLRQDLEANEQDARPKQENHLHSLGRNKVGYHLHPSDKGQFDHSKDGWLGPGPMPAVHKAANGHSRTKMISTSIKTARKSKRASGLRINDYDNQCDVVYISQPITECHFENQKSILSSRKTARKSTRGYFFNGDCCELPTVRTLARNLHSQEKASCSALASEAVFTPKQTLTIPAPRHTVDVQLPREDNPEEPSKEITSHEEGGGDVSPRKEPQEPEVCPTKIKPNLSSSPRSEETTASSLVWPLPAHLPEEDLPEGGSTVSAPTASGMSSPEHNQPPVALLDTEEMSVPQDCHLLPSTESFSGGVSEDVISRPHSPPEIVSREESPQCSENQSSPMGLEPPMSLGKAEDNQSISAEVESGDTQELNVDPLLKESSTFTDENPSETEESEAAGGIGKLEGEDGDVKCLSEKDTYDTSIDSLEENLDKKKKGKKFPEASDRCLRSQLSDSSSADRCLRNQSSDSSSACLEIKVPKNPSAKRSKKEGHPGGTTPKGLLPDSFHTETLEDTEKPSVNERPSEKDAEQEGEGGGIITRQTLKNMLDKEVKELRGEIFPSRDPITTAGQPLPGERLEIYVQSKMDEKNAHIPSESIACKRDPEQAKEEPGHIPTQHVEEAVNEVDNENTQQKDDESDAPCSSLGLSSSGSGDAARAPKSVPRPKRLTSSTYNLRHAHSLGSLGASKVTSEKEAAQVNPIMPKENGASESGDPLDEDDVDTVVDEQPKFMEWCAEEENQELIANFNAQYMKVQKGWIQLEKEGQPTPRARNKSDKLKEIWKSKKRSRKCRSSLESQKCSPVQMLFMTNFKLSNVCKWFLETTETRSLVIVKKLNTRLPGDVPPVKHPLQKYAPSSLYPSSLQAERLKKHLKKFPGATPAKNNWKMQKLWAKFRENPDQVEPEDGSDVSPGPNSEDSIEEVKEDRNSHPPANLPTPASTRILRKYSNIRGKLRAQQRLIKNEKMECPDALAVESKPSRKSVCINPLMSPKLALQVDADGFPVKPKSTEGMKGRKGKQVSEILPKAEVQSKRKRTEGSSPPDSKNKGPTVKASKEKHADGATKTPAAKRPAARDRSSQPPKKTSLKENKVKIPKKSAGKSCPPSR

SEQ ID NO: 2254 - protein, 484 aa, Homo sapiens
MEDEQPDSLEGWVPVREGLFAEPERHRLRFLVAWNGAEGKFAVTCHDRTAQQRRLREGARLGPEPEPKPEAAVSPSSWAGLLSAAGLRGAHRQLAALWPPLERCFPRLPPELDVGGGGAWGLGLGLWALLWPTRAGPGEAALQELCGQLERYLGAAADGCGGATVRDALFPAEGGAADCESPREFRERALRARWVEADARLRQVIQGHGKANTMVALMNVYQEEDEAYQELVTVATMFFQYLLQPFRAMREVATLCKLDILKSLDEDDLGPRRVVALEKEAEEWTRRAEEAVVSIQDITVNYFKETVKALAGMQKEMEQDAKRFGQAAWATAIPRLEKLQLMLARETLQLMRAKELCLNHKRAEIQGKMEDLPEQEKNTNVVDELEIQFYEIQLELYEVKFEILKNEEILLTTQLDSLKRLIKEKQDEVVYYDPCENPEELKVIDCVVGLQDDKNLEVKELRRQCQQLESKRGRICAKKSLSPE

SEQ ID NO: 2255 - protein, 687 aa, Homo sapiens
MSRVCIVVLEEVEDESPAFISKLPQENKSLHSPPSGNVLVRYPSLVQAIFNGDPDEVRALIFKKEDVNFQDNEKRTPLHAAAYLGDAEIIELLILSGARVNAKDSKWLTPLHRAVASCSEEAVQVLLKHSADVNARDKNWQTPLHIAAANKAVKCAEALVPLLSNVNVSDRAGRTALHHAAFSGHGEMVKLLLSRGANINAFDKKDRRAIHWAAYMGHIEVVKLLVSHGAEVTCKDKKSYTPLHAAASSGMISVVKYLLDLGVDMNEPNAYGNTPLHVACYNGQDVVVNELIDCGAIVNQKNEKGFTPLHFAAASTHGALCLELLVGNGADVNMKSKDGKTPLHMTALHGRFSRSQTIIQSGAVIDCEDKNGNTPLHIAARYGHELLINTLITSGADTAKRGIHGMFPLHLAALSGFSDCCRKLLSSGFDIDTPDDFGRTCLHAAAAGGNLECLNLLLNTGADFNKKDKFGRSPLHYAAANCNYQCLFALVGSGASVNDLDERGCTPLHYAATSDTDGKCLEYLLRNDANPGVRDKQGYNAVHYSAAYGHRLCLQLIASETPLDVLMETSGTDMLSDSDNRATISPLHLAAYHGHHQALEVLVQSLLDLDVRNSSGRTPLDLAAFKGHVECVDVLINQGASILVKDYILKRTPIHAAATNGHSECLRLLIGNAEPQNAVDIQDGNGQ

SEQ ID NO: 2256 - protein, 536 aa, Homo sapiens
MANHDIPPDAVPNKKLCRLPPLDTSSLIGVFVEYIISPSQFYIRIYSRDSSELLEDMMIEMRRCYSNQLVSDRYVMPECFIQPGHLCCVRISEDKWWYRVIIHRVLEKQEVEVFYPDFGNIGIVQKSSLRFLKCCYTKLPAQAIPCSLAWVRPVEEHWTSKAILQFQKLCGLKPLVGVVDEYVDGILNIFLCDTSSNEDVYFHHVLRTEGHAIVCRENISSKGFSELNPLALYTTSSGGPEDIVLTELGYPSQQHYFNEDRKISPQSKESELRILDEIPTGMPCLESVTIGDDIWDENWLPLQAKMGKGGDAASHLFTASLGGKNQYSSCKEMPQKDWCFSTPKDTWDDSWQPSGLVNGTKVEVHKPEVLGAQEKNTGTNRTQKQLDINGSSDSSTLPKLEEFCTSLTQSEQSADGSQSEPNNSQTQPKQIQLSTAAPCSTTAVDDSAEKPSGSVESSPEILKNEDFSSSRAITLYKDKRQESVDQLSLILSYECQISQKLYIPRSTATAALGAAARLATSRSLLHWYPSVKRMEA

SEQ ID NO: 2257 - protein, 201 aa, Homo sapiens [sequence omitted]

SEQ ID NO: 2258 - protein, 661 aa, Homo sapiens
MAAIHGRFTRSQILIQNGSEIDCADKFGNTPLHVAARYGHELLISTLMTNGADTARRGIHDMFPLHLAVLFGFSDCCRKLLSSGQLYSIVSSLSNEHVLSAGFDINTPDNLGRTCLHAAASGGNVECLNLLLSSGADLRRRDKFGRTPLHYAAANGSYQCAVTLVTAGAGVNEADCKGCSPLHYAAASDTYRRAEPHTPSSHDAEEDEPLKESRRKEAFFCLEFLLDNGADPSLRDRQGYTAVHYAAAYGNRQNLELLLEMSFNCLEDVESTIPVSPLHLAAYNGHCEALKTLAETLVNLDVRDHKGRTALFLATERGSTECVEVLTAHGASALIKERKRKWTPLHAAAASGHTDSLHLLIDSGERADITDVMDAYGQTPLMLAIMNGHVDCVHLLLEKGSTADAADLRGRTALHRGAVTGCEDCLAALLDHDAFVLCRDFKGRTPIHLASACGHTAVLRTLLQAALSTDPLDAGVDYSGYSPMHWASYTGHEDCLELLLEHSPFSYLEGNPFTPLHCAVINNQDSTTEMLLGALGAKIVNSRDAKGRTPLHAAAFADNVSGLRMLLQHQAEVNATDHTGRTALMTAAENGQTAAVEFLLYRGKADLTVLDENKNTALHLACSKGHEKCALMILAETQDLALSMLPTVRCRCHSTLLPGMV

SEQ ID NO: 2259 - protein, 297 aa, Homo sapiens
MPPSPTAPNGLVDSVTYPVSPPPTSGPAAPPPPPPLPSLASLSHCGSQASPPPSTPIASTPSSKPSVLPSPSAAAPASVETPLPNQVPPPPPPPPAPPLPASGFFLASMSEDNRPLTGLAAAIAGAKLRKVSRMEDTSFPSGGNAIGVNSASSKTDTGRGNGPLPLGGSGLMEEMSALLARRRRIAEKGSTIETEQKEDKGEDSEPVTSKASSTSTPEPTRKPWERTNTMNGSKSPVISRPKSTPLSQPSANGVQTEGLDYDRLKQDILDEMRKELTKLKEELIDAIRQELSKSNTA

SEQ ID NO: 2260 - protein, 130 aa, Homo sapiens
MPHRDTQLLVSMATRRPSLSASVGYYSNPGRDKCTADKGPIWRNHRGHIHCCPLCGQLCARAQAVCWEGHTSCLLGTDGRSRICLSVSSASCPLASPEMHLGVPIHSQGFISHNSYIENIQGCIVDPALF

SEQ ID NO: 2261 - protein, 281 aa, Homo sapiens
MNQPGGAAAPQADGASAAGRKSTASRERLKRSQKSTKVEGPEPVPAEASLSAEQGTMTEVKVKTELPDDYIQEVIWQGEAKEEKKAVSKDGTSDVPAEICVVIGGVRNQQTLGSYECGICGKKYKYYNCFQTHVRAHRDTEATSGEGASQSNNFRYTCDICGKKYKYYSCFQEHRDLHAVDVFSVEGAPENRADPFDQGVVATDEVKEEPPEPFQKIGPKTGNYTCEFCGKQYKYYTPYQEHVALHAPISEYLLPVGMGVGGPGTGWASRWPGLWNLARKW

SEQ ID NO: 2262 - protein, 695 aa, Homo sapiens [sequence omitted]

SEQ ID NO: 2263 - protein, 239 aa, Homo sapiens
MVFGLLLGGKEFNERFKEKLPAPIPLEFFAVVMGTGISAGFNLKESYNVDVVGTLPLGLLPPANPDTSLFHLVYVDAIAIAIVGFSVTISMAKTLANKHGYQVDGNQELIALGLCNSIGSLFQTFSISCSLSRSLVQEGTGGKTQLAGCLASLMILLVILATGFLFESLPQAVLSAIVIVNLKGMFMQFSDLPFFWRTSKIELTIWLTIFVSSLFLGLDYGLITAVIIALLTVIYRTQR

SEQ ID NO: 2264 - protein, 332 aa, Homo sapiens
MSFLDALETGYGKYKNPYHNQIHAADVTQTVHCFLLRTGMVHCLSEIELLAIIFAAAIHDYEHTGTTNSFHIQTKSECAIVYNDRSVLENHHISSVFRLMQDDEMNIFINLTKDEFVELRALVIEMVLATDMSCHFQQVKTMKTALQQLERIDKPKALSLLLHAADISHPTKQWLVHSRWTKALMEEFFRQGDKEAELGLPFSPLCDRTSTLVAQSQIGFIDFIVEPTFSVLTDVAEKSVQPLADEDSKSKNQPSFQWRQPSLDVEVGDPNPDVVSFRSTWVKRIQENKQKWKERAASGITNQMSIDELSPCEEEAPPSPAEDEHNQNGNLD

SEQ ID NO: 2265 - protein, 329 aa, Homo sapiens
MLPWRRNKFVLVEDEAKCKAKSLSPGLAYTSLLSSFLRSCPDLLPDWPLERLGRVFRSRRQKVELNKEDPTYTVWYLGNAVTLHAKGDGCTDDAVGKIWARCGPGGGTKMKLTLGPHGIRMQPCERSAAGGSGGRRPAHAYLLPRITYCTADGRHPRVFAWVYRHQARHKAVVLRCHAVLLARAHKARALARLLRQTALAAFSDFKRLQRQSDARHVRQQHLRAGGAAASVPRAPLRRLLNAKCAYRPPPSERSRGAPRLSSIQEEDEEEEEDDAEEQEGGVPQRERPEVLSLARELRTCSLRGAPAPPPPAQPRRWKAGPRERAGQAR

SEQ ID NO: 2266 - protein, 247 aa, Homo sapiens
MLFPALFPMLFPALFSVLFPALFPMLFPELFPVLFPMLFPALLPALFHMLFPALFPMLFPALFSAPFPMRSLHCSLHCSPCCSLRCSPCCSLHCSPCCSLRCSPCCSLRCSPCCSLHCSPCCSLQCSLHCSPHCSLHCSPCCFLHRSPCCSLQGSLHCSPCCFLHRSPCCSLQGSLHCSPCCSLHISCPRPSHSPTNTLDHPSKASVVSPTTQVLGLGWGRMELDPADPGLRGPSPSDVSPNAMAGS

SEQ ID NO: 2267 - protein, 201 aa, Homo sapiens [sequence omitted]

SEQ ID NO: 2268 - protein, 104 aa, Homo sapiens
MMGVGRCTAAMGSELETAMETLINVFHAHSGKEGDKYKLSKKELKELLQTELSGFLDAQKDVDAVDKVMKELDENGDGEVDFQEYVVLVAALTVACNNFFWENS

SEQ ID NO: 2269 - protein, 1014 aa, Homo sapiens [sequence omitted]

SEQ ID NO: 2270 - protein, 138 aa, Homo sapiens
MLMYQLFFNAALLCNKQPQALSGIDSEYTMLLCLGGQGATLIWTEPAQYLWVIWLPAGVTGATRLCSVCLSSFITLAQACFHGDPEVQERTSLIAQALFKPLLVPWVLASHWPKQVMWPRPGVKNWGPFAMLLVDTGT

SEQ ID NO: 2271 - protein, 204 aa, Homo sapiens
MSHRARSRISFLFLEPSSCPSTSFLHNFTCFPWNPCSVRSNLNSPFLDVFFLSMKLHSVLLNSKSCLEPCHFYMTLQSSISVSGIPSNPTFCSLDFILQFPSPMAQFLTLVPHILSIACAAFPQSLLNSSFILLQFPHLQPALRSSSFMSTHPQVHTHLQVIEERVNQSLGLLDQNPHLAQELRPQIRECLLPWLPLQISEGRS

SEQ ID NO: 2272 - protein, 422 aa, Homo sapiens
MVSESHHEALAAPPVTTVATVLPSNATEPASPGEGKEDAFSKLKEKFMNELHKIPLPPWALIAIAIVAVLLVLTCCFCICKKCLFKKKNKKKGKEKGGKNAINMKDVKDLGKTMKDQALKDDDAETGLTDGEEKEEPKEEEKLGKLQYSLDYDFQNNQLLVGIIQAAELPALDMGGTSDPYVKVFLLPDKKKKFETKVHRKTLNPVFNEQFTFKVPYSELGGKTLVMAVYDFDRFSKHDIIGEFKVPMNTVDFGHVTEEWRDLQSAEKEEQEKLGDICFSLRYVPTAGKLTVVILEAKNLKKMDVGGLSDPYVKIHLMQNGKRLKKKKTTIKKNTLNPYYNESFSFEVPFEQIQKVQVVVTVLDYDKIGKNDAIGKVFVGYNSTGAELRHWSDMLANPRRPIAQWHTLQVEEEVDAMLAVKK

SEQ ID NO: 2273 - protein, 105 aa, Homo sapiens [sequence omitted]

SEQ ID NO: 2274 - protein, 199 aa, Homo sapiens
MLSLEETEAGEEGSRITLPGGGGCRRGDFPWDDEDFRSLALLGAGVAMGFFYLYFRDPGREITWKHFVQYYLARGLVDRLEVVNKQSVRVIPAPGTSSEGAMLTGPPGTGKTLLAKATAGEATVPFITVNGSEFLEMFIGVGPARGSTLPPTSWCWLAPTALTSWTRPSCGLAGFIARFTLVPLTLKAGPPSLRSTCAH

SEQ ID NO: 2275 - protein, 629 aa, Homo sapiens [sequence omitted]

SEQ ID NO: 2276 - protein, 347 aa, Homo sapiens
MKLTSEKLPKNPFYASVSQYAAKNQKFFQWKKEKTDYTHANLVDKALQLLKERILKGDTLAYFLRGQLYFEEGWYEEALEQFEEIKEKDHQATYQLGVMYYDGLGTTLDAEKGVDYMKKILDSPCPKARHLKFAAAYNLGRAYYEGKGVKRSNEEAERLWLIAADNGNPKASVKAQSMLGLYYSTKEPKELEKAFYWHSEACGNGNLESQGALGLMYLYGQGIRQDTEAALQCLREAAERGNVYAQGNLVEYYYKMKFFTKCVAFSKRIADYDEVHDIPMIAQVTDCLPEFIGRGMAMASFYHARCLQLGLGITRDETTAKHYYSKACRLNPALADELHSLLIRQRI

SEQ ID NO: 2277 - protein, 197 aa, Homo sapiens
MHGSVVYISALPFMWPSSLCIIFLSCVMKSKMRQALGFAKEARESPDTQALLTCAEKEEENQENLDWVPLTTLSHCKSLRTMTAISRYMELTIEPVQQAGCSATRLPGDGQTSAGDASLQDPPSYPPVQVIRARVSSGSSSEVSSINSDLEQKYWEALNSEQDPEDVNLEGSKENVELLGSQVHQDSVRTAHLSDDD

SEQ ID NO: 2278 - protein, 303 aa, Homo sapiens
MSHLQGQPPADPQPRPALPAAPWACLCPHSHPVHSCVSVAGDRGWGKGLRYTRGCGDPQHGCPGSSLWKCRIGSGPQSCAGPSVPSPSPESLLPASAAPRVVGATSLGSGLGAFMMPAWGLSKSSPRGLSKSSPRGLSKSSPRGLSMSSPRGLSKSSPRGLSKSSPWGLSKSSPRGLSMSSPRGLSKSSPRGLSKSSPWGLSKSFLCRLSKSSPWVLSMSSPQGLSKSSPRGLSKSSPRGLSMSSPRGLSKSSPRGLIMSSPRGLSMSSPRGLSKSSPWGLSMSSPRGLSKSSPRGLCPPHGV

SEQ ID NO: 2279 - protein, 136 aa, Homo sapiens
MSATQAENKQTALRATGSGWMHVFPAPTWQSLRPGLCISSGETEAPRGPTPHPEQLTSCPILLPPGPSPIPSPTPGLSFLSRQGGIWTVPVPLLCPLPPGVPVARSLPEAEDGAGRVWPGAERGSGAGLCPAPAGV

SEQ ID NO: 2280 - protein, 168 aa, Homo sapiens
MKASGRQPLEDQSGAGTSSACCRVWRVTTQKGGTGEWTQASVLSGAVPATGFLRQSGIGLDSRGFIPVNKMMQTNVPGVFAAGDAVTFPLAWRNNRKVNIPHWQMAHAQGRVAAQNMLAQEAEMSTVPYLWTAMFGKSLRYAGYGEGFDDVIIQGDLEELKFVAFYTK

SEQ ID NO: 2281 - protein, 524 aa, Homo sapiens
MHSLDEPLDLKLSITKLRAAREKRERTLGVVRPRALHRELGLVDDSPTPGSPGSPPSGFLLNSKFPEKVEGRFSAAPLVDLSLSPPSGLDSPNGSSSLSPERQGNGDLPPVPSASDFQPLRYLDGVPSSFQFFLPLGSGGALHLPASSFLTPPKDKCLSPDLPLPKQLVCRWAKCNQLFELLQDLVDHVNDYHVKPEKDAGYCCHWEGCARHGRGFNARYKMLIHIRTHTNEKPHRCPTCSKSFSRLENLKIHNRSHTGEKPYVCPYEGCNKRYSNSSDRFKHTRTHYVDKPYYCKMPGCHKRYTDPSSLRKHIKAHGHFVSHEQQELLQLRPPPKPPLPAPDGGPYVSGAQIIIPNPAALFGGPGLPGLPLPLAPGPLDLSALACGNGGGSGGGGGMGPGLPGPVLPLNLAKNPLLPSPFGAGGLGLPVVSLLAGAAGGKAEGEKGRGSVPTRALGMEGHKTPLERTESSCSRPSPDGLPLLPGTVLDLSTGVNSAASSPEALAPGWVVIPPGSVLLKPAVVN

SEQ ID NO: 2282 - protein, 446 aa, Homo sapiens
MHEPSLCANVECPPAHTCPCGVPACSCAHVECPPAHTCRCGVPACSHMPMWSARLLTRAHVECPPAHTRVHVECPPAHVPMWSAHLLTCADVECHLLTHVPMWSARLLTCPCGVPACSHVPMRSARLLTRAHAECPPAHTCPCGVPACSHVPMRSARLLTRADVECPPAHTCPCGVPACSHVPTWSARLITRAHVECSPAHTCRCGVPACSHVPMWSVRLLTRADAECPPAHTCRCGVPACSHVPMWSARLLTCRCGVPACSHVPMWSARLLTCRCGVPACSHVPMWSARLLTRAHEECPPAHTCRRGVPACSRAHMECPPAHTCHCGVPACSHTCRCGVPACSHVPMWSARLLTRAHVECPPAHTRAHVECPPAHTCPCGVPACSHTCPCGVPACSHKALAWWFCRFPVLPAESDAVTVHSTHGGFLIRFYVKDPFYISLHLEIT

SEQ ID NO: 2283 - protein, 398 aa, Homo sapiens [sequence omitted]

SEQ ID NO: 2284 - protein, 1105 aa, Homo sapiens [sequence omitted]

SEQ ID NO: 2285 - protein, 725 aa, Homo sapiens [sequence omitted]

SEQ ID NO: 2286 - protein, 267 aa, Homo sapiens
MAVILFTQLTAPMAVILFTQLTAPMAVILFTQLTAPMAVILFTQLTAPMAVILFTQLTAPMAVILFTQLTAPMAVILFTQLTAPMAVILFTQLTAPMTVILFTQLTAPMTVILFTQLTAPMAVILFTQLTAPMAVILFTQLTAPMAVILFTQLTAPMAVILFTQLTAPMTVILFTQLTAPMTVILFTQLTAPMAVILFTQLTAPMTVILFTQFTAPMTVILFTQFTAPMAVILFTQFTAPMAVILFTQLTAPMTVILFTQFTAPLSN

SEQ ID NO: 2287 - protein, 118 aa, Homo sapiens
MGKKDDPKLMQEWFKLVQEKNAMVRYESELMIFARELELEDRQSRLQQELRERMAVEDHLKTEEELSEEKQILNEMLEVVEQRDSLAALLEEQRLREREEDKDLEAAMLSKGFSLNWS

SEQ ID NO: 2288 - protein, 130 aa, Homo sapiens
MLRFMVKEIVRDLDQDGDKQLSVPEFISLPVGTVENQQGQDIDDNWVKDRKKEFEELIDSNHDGIVTAEELESYMDPMNEYNALNEAKQMIAVADENQNHHLEPEEVLKYSEFFTGSKLVDYARSVHEEF

SEQ ID NO: 2289 - protein, 100 aa, Homo sapiens
MAAEEKDPLSYFAAYGSSSSGSSDEEDNIEPEETSRRTPDPAKSAGGCRNKAEKRLPGPDELFRSVTRPAFLYNPLNKQIDWERHVVKAPEELLPETPSL

SEQ ID NO: 2290 - protein, 238 aa, Homo sapiens [sequence omitted]

SEQ ID NO: 2291 - protein, 249 aa, Homo sapiens [sequence omitted]

SEQ ID NO: 2292 - protein, 121 aa, Homo sapiens [sequence omitted]

SEQ ID NO: 2293 - protein, 412 aa, Homo sapiens [sequence omitted]

SEQ ID NO: 2294 - protein, 100 aa, Homo sapiens
MVHCSLDLLGSNDSPISASQGARTTGTGCHTWPILKIIFGRDTSLPKFHFAVLPRLVSKLLGSSHSPTSASQQYWDYRHEPCIPSFSVTLIVVILIGVRW

SEQ ID NO: 2295 - protein, 102 aa, Homo sapiens
MGKQLRTVLHVHDRGARQPGPPSAAETLTDPSSPLAAPTLATTPSPAPVAVDPSAALRGLDALRSPEPDDRALETSGTPRKTCSDLEPPPTAATHFEFFKET

SEQ ID NO: 2296 - protein, 783 aa, Homo sapiens
MAHDILKVWDGPVDSDILLKEWSGSALPEDIHSTFNSLTLQFDSDFFISKSGFSIQFSTSIAATCNDPGMPQNGTRYGDSREAGDTVTFQCDPGYQLQGQAKITCVQLNNRFFWQPDPPTCIAACGGNLTGPAGIILSPNYPQPYPPGKECDWRVKVNPDFVIALIFKSFNMEPSYDFLHIYEGEDSNSPLIGSYQGSQAPERIESSGNSLFLAFRSDASVGLSGFAIEFKEKPREACFDPGNIMNGTRVGTDFKLGSTITYQCDSGYKILDPSSITCVIGADGKPSWDQVLPSCNAPCGGQYTGSEGVVLSPNYPHNYTAGQICLYSITVPKEFVVFGQFAYFQTALNDLAELFDGTHAQARLLSSLSGSHSGETLPLATSNQILLRFSAKSGASARGFHFVYQAVPRTSDTQCSSVPEPRYGRRIGSEFSAGSIVRFECNPGYLLQGSTALHCQSVPNALAQWNDTIPSCVVPCSGNFTQRRGTILSPGYPEPYGNNLNCIWKIIVTEGSGIQIQVISFATEQNWDSLEIHDGGDVTAPRLGSFSGTTVPALLNSTSNQLYLHFQSDISVAAAGFHLEYKTVGLAACQEPALPSNSIKIGDRYMVNDVLSFQCEPGYTLQGRSHISCMPGTVRRWNYPSPLCIATCGGTLSTLGGVILSPGFPGSYPNNLDCTWRISLPIGYGAHIQFLNFSTEANHDFLEIQNGPYHTSPMIGQFSGTDLPAALLSTTHETFIHFYSDHSQNRQGFKLAYQGGSGNIGPAFPCLDTPFQARCQGEERTFN

SEQ ID NO: 2297 - protein, 1127 aa, Homo sapiens [sequence omitted]

SEQ ID NO: 2298 - protein, 145 aa, Homo sapiens
MSDGLVALEVTSLKLCSEALLSGGLVALEVTALKLCSVTLASGGLVALEVTALKLCSVALMSDGLVALEVTSLKLCSVALLSGGLVALEVTSLKLCSVASLSVGLVALEVTSLKLCSVALLSGGLVVSFFGCGQWLHVQLGGWPL

SEQ ID NO: 2299 - protein, 1349 aa, Homo sapiens [sequence omitted]

SEQ ID NO: 2300 - protein, 235 aa, Homo sapiens
MAEKVNNFPPLPKFIPLKPCFYQDFEADIPPQHVSMTKRLYYLWMLNSVTLAVNLVGCLAWLIGGGGATNFGLAFLWLILFTPCSYVCWFRPIYKAFKTDSSFSFMAFFFTFMAQLVISIIQAVGIPGWGVCGWIATISFFGTNIGSAVVMLIPTVMFTVMAVFSFIALSMVHKFYRGSGGSFSKAQEEWTTGAWKNPHVQQAAQNAAMGAAQGAMNQPQTQYSATPNYTYSNEM

SEQ ID NO: 2301 - protein, 225 aa, Homo sapiens [sequence omitted]

SEQ ID NO: 2302 - protein, 1042 aa, Homo sapiens
MDKILEGLVSSSHPLPLKRVIVRKVVESAEHWLDEAQCEAMFDLTTRLILEGQDPFQRQVGHQVLEAYARYHRPEFESFFNKTFVLGLLHQGYHSLDRKDVAILDYIHNGLKLIMSCPSVLDLFSLLQVEVLRMVCERPEPQLCARLSDLLTDFVQCIPKGKLSITFCQQLVRTIGHFQCVSTQERELREYVSQVTKVSNLLQNIWKAEPATLLPSLQEVFASISSTDASFEPSVALASLVQHIPLQMITVLIRSLTTDPNVKDASMTQALCRMIDWLSWPLAQHVDTWVIALLKGLAAVQKFTILIDVTLLKIELVFNRLWFPLVRPGALAVLSHMLLSFQHSPEAFHLIVPHVVNLVHSFKNDGLPSSTAFLVQLTELIHCMMYHYSGFPDLYEPILEAIKDFPKPSEEKIKLILNQSAWTSQSNSLASCLSRLSGKSETGKTGLINLGNTCYMNSVIQALFMATDFRRQVLSLNLNGCNSLMKKLQHLFAFLAHTQREAYAPRIFFEASRPPWFTPRSQQDCSEYLRFLLDRLHEEEKILKVQASHKPSEILECSETSLQEVASKAAVLTETPRTSDGEKTLIEKMFGGKLRTHIRCLNCRSTSQKVEAFTDLSLAFCPSSSLENMSVQDPASSPSIQDGGLMQASVPGPSEEPVVYNPTTAAFICDSLVNEKTIGSPPNEFYCSENTSVPNESNKILVNKDVPQKPGGETTPSVTDLLNYFLAPEILTGDNQYYCENCASLQNAEKTMQITEEPEYLILTLLRFSYDQKYHVRRKILDNVSLPLVLELPVKRITSFSSLSESWSVDVDFTDLSENLAKKLKPSGTDEASCTKLVPYLLSSVVVHSGISSESGHYYSYARNITSTDSSYQMYHQSEALALASSQSHLLGRDSPSAVFEQDLENKEMSKEWFLFNDSRVTFTSFQSVQKITSRFPKDTAYVLLYKKQHSTNGLSGNNPTSGLWINGDPPLQKELMDAITKDNKLYLQEQELNARARALQAASASCSFRPNGFDDNDPPGSCGPTGGGGGGGFNTVGRLVF

SEQ ID NO: 2303 - protein, 526 aa, Homo sapiens [sequence omitted]

SEQ ID NO: 2304 - protein, 125 aa, Homo sapiens
MHLSWCAPELACTSACMHLSQCAPCLACTSTYMHLSWHAPELACTSACVHLSQCAPCLACTSTYMHLSWHAPELACTSACMHLSQRAPYLACTSAYMHLSWCAPELACTSACMHLSWRAPELACI

SEQ ID NO: 2305 - protein, 104 aa, Homo sapiens
MHHANQGCRLLTSFQPAQPPSPLSWAELRSASGETRDPYGSSSAWMESPACCLRERSAPQPGDIARLPLPASASKVAAFPGTRACFSRALLKISSAGPYGRTTV

SEQ ID NO: 2306 - protein, 249 aa, Homo sapiens
MEKKDCPRNHSHTRNFYYITMLRDPVSRYLSEWKHVQRGATWKTSLHMCDGRSPTPDELPTCYPGDDWSGVSLREFMDCTYNLANNRQVRMLADLSLVGCYNLTFMNESERNTILLQSAKNNLKNMAFFGLTEFQRKTQFLFERTFNLKFISPFTQFNITRASNVEINEGARQRIEDLNFLDMQLYEYAKDLFQQRYHHTKQLEHQRDRQKRREERRLQREHRDHQWPKEDGAAEGTVTEDYNSQVVRW

SEQ ID NO: 2307 - protein, 121 aa, Homo sapiens [sequence omitted]

SEQ ID NO: 2308 - protein, 122 aa, Homo sapiens
MPANEDAPQPGEHGSACEVSVSFEDVTVDFSREEWQQLDSTQRRLYQDVMLENYSHLLSVGFEVPKPEVIFKLEQGEGPWTLEGEAPHQSCSDGKFGIKPSQRRISGKSTFHSEMEGEDTLC

SEQ ID NO: 2309 - protein, 293 aa, Homo sapiens [sequence omitted]

SEQ ID NO: 2310 - protein, 197 aa, Homo sapiens
MNAIVALCHFCELHGPRTLFCTEVLHAPLPQGDGNEDSPGQGEQAEEEEGGIQMNSRMRAHSPAEGASVESSSPGPKKSDMCEGCRSLAAGHPGYISHDKETSIKYVSHQHPSHPQLFSIVRQACVRSLSCEVSLVATEPVSVGAHMLPGALGGLGASIAQGGRHWSSLRADPQISTAQGTGRLPCPELREESCWTC

SEQ ID NO: 2311 - protein, 110 aa, Homo sapiens
MALVPSGPILKASDLVFSYDKGAPRMWQSPFLEGESDWVREAPPVCRAPIGQVQCPKHLRGKWLLEVQPIWLLLTWTLKAQGHMTQAQGVTTACRKSHSHSSEEAVEMSG

SEQ ID NO: 2312 - protein, 117 aa, Homo sapiens [sequence omitted]

SEQ ID NO: 2313 - protein, 157 aa, Homo sapiens [sequence omitted]

SEQ ID NO: 2314 - protein, 213 aa, Homo sapiens [sequence omitted]

SEQ ID NO: 2315 - protein, 179 aa, Homo sapiens
MIGYFHLWIPGFAILTKPLYKLTKGNLADPINPKSFPHSSFHSLKIALETAPTLALPDSSQPFSLHTAKVQGCAVGILTQGPGPCPIAFLSKQLDLTVLGWPSCLCAVAATALILLEALKITNYAQLTLYSSHNFQNLFSSSHLMHILSAALHYLSASQTHCLNSSPHPCKGIMCQYLY

SEQ ID NO: 2316 - protein, 392 aa, Homo sapiens [sequence omitted]

SEQ ID NO: 2317 - protein, 108 aa, Homo sapiens
MLLWVMAWRLPPQSLNGQISYSSHPWEYFIKQNYKSPCFFRSTVQWESLSCLFFFFFFLLSFYTGIFFSFYFFFLLLFISSLKKMIGSTQPQGTDLSKPSWDKYFFEK

SEQ ID NO: 2318 - protein, 882 aa, Homo sapiens [sequence omitted]

SEQ ID NO: 2319 - protein, 126 aa, Homo sapiens [sequence omitted]

SEQ ID NO: 2320 - protein, 518 aa, Homo sapiens
MGFHLITQLKGMSVVLVLLPTLLLVMLTGAQRACPKNCRCDGKIVYCESHAFAGIPENISGGSQGLSLRFNSIQKLKSNQFAGLNQLIWLYLDHNYISSVDEDAFQGIRRLKELILSSNKITYLHNKTFHPVPNLRNLDLSYNKLQTLQSEQFKGLRKLIILHLRSNSLKTVPIRVFQDCRNLDFLDLGYNRLRSLSRNAFAGLLKLKELHLEHNQFSKINFAHFPRLFNLRSIYLQWNRIRSISQGLTWTWSSLHNLDLSGNDIQGIEPGTFKCLPNLQKLNLDSNKLTNISQETVNAWISLISITLSGNMWECSRSICPLFYWLKNFKGNKESTMICAGPKHIQGEKVSDAVETYNICSEVQVVNTERSHLVPQTPQKPLIIPRPTIFKPDVTQSTFETPSPSPGFQIPGAEQEYEHVSFHKIIAGSVALFLSVAMILLVIYVSWKRYPASMKQLQQHSLMKRRRKKARESERQMNSPLQEYYVDYKPTNSETMDISVNGSGPCTYTISGSRECEV

SEQ ID NO: 2321 - protein, 143 aa, Homo sapiens [sequence omitted]

SEQ ID NO: 2322 - protein, 101 aa, Homo sapiens
MTIAAYQTLYESSVAFGMRKALQAEQGKSDMERKVSGVYRDPWSHLFCKPQGHMLIIPALHSDLLRCSADSHDTWTCITSVRDPWLSMMASLVVLAELFPL

SEQ ID NO: 2323 - protein, 338 aa, Homo sapiens
MEYQALQRAYALLQEQVGGTLDAEREVKTREQLQAEVQRAQARIEDLEKALAEQGQDMKWIEEKQALYRRNQELVEKIKQMETEEARLRHEVQDARDQNELLEFRILELEERERKSPAISFHHTPFVDGKSPLQVYCEAEGVTDIVVAELMKKLDILGDNANLTNEEQVVVIQARTVLTLAEKWLQQIEETEAALQRKMVDLESEKELFSKQKGYLDEELDYRKQALDQANKHILELEAMLYDALQQEAGAKVAELLSEEEREKLKVAVEQWKRQVMSELRERDAQILRERMELLQLAQQRIKELEERIEAQKRQIKELEEKFLFLFLFFSLAFILWS

SEQ ID NO: 2324 - protein, 148 aa, Homo sapiens [sequence omitted]

SEQ ID NO: 2325 - protein, 333 aa, Homo sapiens [sequence omitted]

SEQ ID NO: 2326 - protein, 206 aa, Homo sapiens [sequence omitted]

SEQ ID NO: 2327 - protein, 245 aa, Homo sapiens [sequence omitted]

SEQ ID NO: 2328 - protein, 945 aa, Homo sapiens [sequence omitted]

SEQ ID NO: 2329 - protein, 1232 aa, Homo sapiens
MMCEVMPTINEDTPMSQRGSQSSGSDSDSHFEQLMVNMLDERDRLLDTLRETQESLSLAQQRLQDVIYDRDSLQRQLNSALPQEFAALTKELNACREQLLEKEEEISELKAERNNTRLLLEHLECLVSRHERSLRMTVVKRQAQSPSGVSSEVEVLKALKSLFEHHKALDEKVRERLRVSLERVSALEEELAAANQEIVALREQNVHIQRKMASSEGSTESEHLEGMEPGQKVHEKRLSNGSIDSTDETSQIVELQELLEKQNYEMAQMKERLAALSSRVGEVEQEAETARKDLIKTEEMNTKYQRDIREAMAQKEDMEERITTLEKRYLSAQRESTSIHDMNDKLENELANKEAILRQMEEKNRQLQERLELAEQKLQQTMRKAETLPEVEAELAQRIAALTKAEERHGNIEERMRHLEGQLEEKNQELQRARQREKMNEEHNKRLSDTVDRLLTESNERLQLHLKERMAALEEKNVLIQESETFRKNLEESLHDKERLAEEIEKLRSELDQLKMRTGSLIEPTIPRTHLDTSAELRYSVGSLVDSQSDYRTTKVIRRPRRGRMGVRRDEPKVKSLGDHEWNRTQQIGVLSSHPFESDTEMSDIDDDDRETIFSSMDLLSPSGHSDAQTLAMMLQEQLDAINKEIRLIQEEKESTELRAEEIENRVASVSLEGLNLARVHPGTSITASVTASSLASSSPPSGHSTPKLTPRSPAREMDRMGVMTLPSDLRKHRRKIAVVEEDGREDKATIKCETSPPPTPRALRMTHTLPSSYHNDARSSLSVSLEPESLGLGSANSSQDSLHKAPKKKGIKSSIGRLFGKKEKARLGQLRGFMETEAAAQESLGLGKLGTQAEKDRRLKKNTSGHELLEEARRKGLPFAQWDGPTVVAWLELWLGMPAWYVAACRANVKSGAIMSALSDTEIQREIGISNPLHRLKLRLAIQEMVSLTSPSAPPTSRTPSGNVWVTHEEMENLAAPAKTKESEEGSWAQCPVFLQTLAYGDMNHEWIGNEWLPSLGLPQYRSYFMECLVDARMLDHLTKKDLRVHLKMVDSFHRTSLQYGIMCLKRLNYDRKELERRREASQHEIKDVLVWSNDRVIRWIQAIGLREYANNILESGVHGSLIALDENFDYSSLALLLQIPTQNTQARQILEREYNNLLALGTERRLDESDDKNFRRGSTWRRQFPPREVHGISMMPGSSETLPAGFRLTTTSGQSRKMTTDDGVFSVYST

SEQ ID NO: 2330 - protein, 521 aa, Homo sapiens
MIPYKTDSGSDHHDCMPLACLILLSLLLFYSTSRPRAMAILGTEGRGSFSCPKTKTDGSPKSTSSPVTTYHLQRALPGGIILMELAFQGCYFCVKQFALECSRIPMGQAVNSQLSMLFTEECDKVRDLMHVHSFSYDFHLRLVHQHVLGAHLVLRHGYHLTTFLRHFLAHHPDGPHFGRNHIYQGTLELPTPLIAAHQLYNYVADHASSYHMKPLRMARPGGPEHNEYALVSAWHSSGSYLDSEGLRHQDDFDVSLLVCHCAAPFEEQGEAERHVLRLQFFVVLTSQRELFPRLTADMRRFRKPPRLPPEPEAPGSSAGSPGEASGLILAPGPAPLFPPLAAEVGMARARLAQLVRLAGGHCRRDTLWKRLFLLEPPGPDRLRLGGRLALAELEELLEAVHAKSIGDIDPQLDCFLSMTVSWYQSLIKVLLSRFPQSCRHFQSPDLGTQYLVVLNQKFTDCFVLVFLDSHLGKTSLTVVFREPFPVQPQDSESPPAQLVSTYHHLESVINTACFTLWTRLL

SEQ ID NO: 2331 - protein, 437 aa, Homo sapiens
MAAAITDMADLEELSRLSPLPPGSPGSAARGRAEPPEEEEEDESSSSGGGEEESSAESLVGSSGGSSSDETRSLSPGAASSSSGDGDGKEGLEEPKGPRGSQGGGGGGSSSSSVVSSGGDEGYGTGGGGSSATSGGRRGSLEMSSDGEPLSRMDSEDSISSTIMDVDSTISSGRSTPAMMNGQGSTTSSSKNIAYNCCWDQCQACFNSSPDLADHIRSIHVDGQRGGVFVCLWKGCKVYNTPSTSQSWLQRHMLTHSGDKPFKCVVGGCNASFASQGGLARHVPTHFSQQNSSKVSSQPKAKEESPSKAGMNKRRKLKNKRRRSLPRPHDFFDAQTLDAIRHRAICFNLSAHIESLGKGHSVVFHSTVIAKRKEDSGKIKLLLHWMPEDILPDVWVNESERHQLKTKVVHLSKLPKDTALLLDPNIYRTMPQKRLKR

SEQ ID NO: 2332 - protein, 111 aa, Homo sapiens
MLLPPRNIASKLPDAAAKSKPQQSASGNNESSQVESTKEGNPSTTACDSQDEGRPCSMKHKESPPSNATAETEPIPQKLQMPPCSECEVKKAPEKPLTSFEGMAAREEKIL

SEQ ID NO: 2333 - protein, 702 aa, Homo sapiens
MDKRLVVSLLLCLLDWIMALPLKTLLQPFHATGAESDKTEKSVLNCIYKVLHGCVYGAQCFSNPRYFPMSLSDLASVDYDPFMHLESLKEPEPLHSPDSERSSKLQPVTEVKTQMQHGLISIAARTVITHLVNHLGHYPMSGGPAMLTSQVCENHDNHYSESTELSPELFESPNIQFFVLNNTTLVSCIQIRSEENMPGGGLSAGLASANSNVRIIVRDLSGKYSWDSAILYGPPPVSGLSEPTSFMLSLSHQEKPEEPPTSNECLEDITVKDGLSLQFKRFRETVPTWDTIRDEEDVLDELLQYLGVTSPECLQRTGISLNIPAPQPVCISEKQENDVINAILKQHTEEKEFVEKHFNDLNMKAVEQDEPIPQKPQSAFYYCRLLLSILGMNSWDKRRSFHLLKKNEKLLRELRNLDSRQCRETHKIAVFYVAEGQEDKHSILTNTGGSQAYEDFVAGLGWEVNLTNHCGFMGGLQKNKSTGLTTPYFATSTVEVIFHVSTRMPSDSDDSLTKKLRHLGNDEVHIVWSEHTRDYRRGIIPTEFGDVLIVIYPMKNHMFSIQIMKKPEVPFFGPLFDGAIVNGKVLPIMVRATAINASRALKSLIPLYQNFYEERARYLQTIVQHHLEPTTFEDFAAQVFSPAPYHHLPSDAVGSYPEILPSETPTATQVDGADLASPMSPRTSKSRMSMKLRRSSGSANKS

SEQ ID NO: 2334 - protein, 191 aa, Homo sapiens [sequence omitted]

SEQ ID NO: 2335 - protein, 1006 aa, Homo sapiens [sequence omitted]

SEQ ID NO: 2336 - protein, 453 aa, Homo sapiens
MAIFRQLSLGAKATLAAVTVFVSMIASRSYLAESLELRAWRWLLRLQLALFVNSLLLIGSLYIWRSTVSNLCHSPAAESTCFQLWKVVVLAFLALAHSSFFTMFFLVAEEPYLFSLAAYSCLGAYIIMLFFLFILSGMEQAYQLLAWRSGRVVGSLEKTRKLVLRPALAVGVTAVLSVAGILNAAQPPAVKTVEVPIHQLPASMNNLKVVLLSDIHLGPTVGRTKMEMFVRMVNVLEPDITVIVGDLSDSEASVLRTAVAPLGQLRSHLGAYFVTGNHEYYTSDVSNWFALLESLHVQPLHNENVKISATRAQRGGGGSGSGSEDEDWICLAGVDDIEADILHYSGHGMDLDKALEGCSPDHTIILLAHQPLAAKRALQARPDINLILSGHTHAGQIFPLNVAAYLLNPFFAGLYQVAQATFVYVSPGTAYYGIPMRLGSRAEITELILQRSP

SEQ ID NO: 2337 - protein, 834 aa, Homo sapiens [sequence omitted]

SEQ ID NO: 2338 - protein, 150 aa, Homo sapiens [sequence omitted]

SEQ ID NO: 2339 - protein, 140 aa, Homo sapiens
MFARLCPVSETFGRLCPVSETFARLCPVSETFARLCPVSETFARLCPVSETFGRLCPVSEMFGRLSPVSETFGRLCPVSETFGRLCPVSEMFARLCPVSETFGRLSPVSEMFGRLCPVSEMFGRLCPVSEMFGRLCPVIT

SEQ ID NO: 2340 - protein, 130 aa, Homo sapiens
MDVFSPKRSCPSQCSTAQQVAELSTREQWLCPTGSQDTSCPPLGMFPVLSSTVSAAQLSAVGDRCPQLCFLMRLLACIPSMAQLGPWQLCWLLAVFTHRAGHLCSTPVPSLLLLSLCFPAHIFTFSDLFL

SEQ ID NO: 2341 - protein, 136 aa, Homo sapiens [sequence omitted]

SEQ ID NO: 2342 - protein, 250 aa, Homo sapiens [sequence omitted]

SEQ ID NO: 2343 - protein, 360 aa, Homo sapiens [sequence omitted]

SEQ ID NO: 2344 - protein, 102 aa, Homo sapiens
MTVTDFGWEDALHTVRAGRSCANPNVGFQRQLQEFEKHEVHQYRQWLKEEYGESPLQDAEEAKNILGKYKEQGRTEPQPGARRWSSFPALAPLTYDNYTTET

SEQ ID NO: 2345 - protein, 628 aa, Homo sapiens
MLTCILWMLSVLMLGNSVLWCRTNTRSHLQVFYPYKKVHVLFEIFVHTKIIMYFYSVFSFMFPVAGGIRPPQAGLMPMQQQGFPMVSVMQPNMQGIMGMNYSSQMSQGPIAMQAGIPMGPMPAAGMPYLGQAPFLGMRPPGPQYTPDMQKQFAEEQQKRFEQQQKLLEEERKRRQFEEQKQKLRLLSSVKPKTGEKSRDDALEAIKGNLDGFSRDAKMHPTPASHPKKPDCPTSSHSTKTVSPSPAFLDEEEFSDFMQGPVEVPPCGPSSTSQPFQSFHPSTPLGQLHTQKAGTQPLPPSQSPVPFALHGVPGQIPYFSTASASHSVPEAGPSLEEKFLVSCDISTPGQEQIKLNTSEVGHKALGPGSSKKYPSLMASNGVAVDGCVSGTTTAEAENTSDQNLSIEESGVGVFPSQDPAQPRMPPWIYNESLVPDAYKKILETTMTPTGIDTAKLYPILMSSGLPRETLGQIWALANRTTPGRLTKEELYTVLAMIAVTQRGVPAMSPDALNQFPAAPIPTLSGFSMTLPTPVSQPTVIPSGPAGSMPLSLGQPVMGINLVGPVGGAAAQASSGFIPTYPANQVVKPEEDDFQDFQDASKSGSLDDSFSDFQELPASSKTSNSQHGNR

SEQ ID NO: 2346 - protein, 519 aa, Homo sapiens [sequence omitted]

SEQ ID NO: 2347 - protein, 472 aa, Homo sapiens
MKMQVFCKKSIEDMTVKAEQSQQEAAKKHEEEKKELERKLSDLEKKMETSHNQCQELKARYERATSETKTKHEEILQNLQKTLLDTEDKLKGAREENSGLLQELEELRKQADKAKAAQTAEDAMQIMEQMTKEKTETLASLEDTKQTNAKLQNELDTLKENNLKNVEELNKSKELLTVENQKMEEFRKEIETLKQAAAQKSQQLSALQEENVKLAEELGRSRDEVTSHQKLEEERSVLNNQLLEMKKRESKFIKDADEEKASLQKSISITSALLTEKDAELEKLRNEVTVLRGENASAKSLHSVVQTLESDKVKLELKVKNLELQLKENKRQLSSSSGNTDTQADEDERAQESQQMIDFLNSVIVDLQRKNQDLKMKVEMMSEAALNGNGDDLNNYDSDDQEKQSKKKPRLFCDICDCFDLHDTEDCPTQAQMSEDPPHSTHHGSRGEERPYCEICEMFGHWATNCNDDETF

SEQ ID NO: 2348 - protein, 100 aa, Homo sapiens [sequence omitted]

SEQ ID NO: 2349 - protein, 114 aa, Homo sapiens [sequence omitted]

SEQ ID NO: 2350 - protein, 369 aa, Homo sapiens
MELKKDINAVSIDMLLIVHSEKRRAAQGFQGVGNGVRRWQKLEGNDFHGTQLTVEVHPRDAMPQLLKKFSLAKRLQGDKNGNTRPRQPGGKDAHAYPWDRSSLKSMSLERVRAIWIWICHHIEYDIAAAQEKDRQAFKPTDILRTQKTNCDGYAGLFERMCRLAGVQCMTVPGYSKGFGYQTGQSFSGEFDHAWNAVYLEGRWHLVDSTWGSGLVDTITSKFTFLYNEFYFLTHPALFIEDHFPDNKNWQLLKPPQSLRQFENNMYHKSEFYNKGMLSAHPETSMIRTGEPGAGASVLAAGMEHFALSSRSPPETALSRHALPDAWLVSLAQSLCVHVDEWRLLRQPRPSGQGRAIGHISRDKSSLTLA

SEQ ID NO: 2351 - protein, 738 aa, Homo sapiens
MQFLHKLILNHNPLTTVEDPYLFKLPALKYLDMGTTLVPLTTLKNILMMTVELEKLILPSHMACCLCQFKNSIEAVCKTVKLHCNSACLTNTIHCPEEASVGNPEGAFMKVLQARKNYTSTELIVEPEEPSDSSGINLSGFGSEQLDTNDESDFISTLRYILPYFSAVNLDVKSLLLPLIKLPTTGNSLAKIQTVGQNRQRVKRVLMGPRSIQKRHFKEVGRQSIRREQGAQASVENAAEEKRLGSPAPREVEQPHTQQGPEKLAGNAVYTKPSFTQEHKAAVSVLKPFSKGAPSTSSPAKALPQVRDRWKDLTHAISILESAKARVTNTKTSKPIVHARKEYRFHKTRSHVTHRTPKVKKSPKVRKKSYLSRLMLANRLPFSAAKSLINSPSQGAFSSLGDLSPQENPFLEVSAPSEHFIEKNNTKHTTARNAFEENDFMENTNMPEGTISENTNYNHPPEADSAGTAFNLGPTVKQTETKWEYNNVGTDPSPEPKSFNYPLLSSPGDQFEIQLTQQLQSLIPNNNVRRLIAHVIRTLKMDCSGAHVQVTCAKLISRTGHLMKLLSGQQEVKASKIEWDTDQWKIENYINESTEAQSEQKEKSLELKKEVPGYGYTDKLILALIVTGILTILIILFCLIVICCHRRSLQEDEEGFSRGIFRFLPRRGCSSRRESQDGLSSFGQPLWFKDMYKPLSATRINNHAWKLHKKSSNEDKILNRDPGDSEAPTEEEESEALP

SEQ ID NO: 2352 - protein, 104 aa, Homo sapiens [sequence omitted]

SEQ ID NO: 2353 - protein, 121 aa, Homo sapiens
MCRGLVNVTITIYSDGSTRGPRLDGSPDSWDWPVHRSRLPGPRVLASKANLVPSATTAPSRPQRQLREGGVRTHVQEDFKVAVYERDPDEHVAPPEVPQLRRKGGQRAVKPALPHAPCWPG

SEQ ID NO: 2354 - protein, 125 aa, Homo sapiens [sequence omitted]

SEQ ID NO: 2355 - protein, 741 aa, Homo sapiens
MNKRIIEEICRKVTPPVPPKKVTAAEKKTLDKEERRQKARERQQKLLAEFASRQKSFMETAMDVDSPENDIPMEITTAEPQVSEAVYDCVICGQSGPSSEDRPTGLVVLLQASSVLGQCRDNVEPKKLPISEEEQIYPWDTCAAVHDVRLSLLQRYFKDSSCLLAVSIGWEGGVYVQTCGHTLHIDCHKSYMESLRNDQVLQGFSVDKGEFTCPLCRQFANSVLPCYPGSNVENNPWQRPSNKSIQDLIKEVEELQGRPGAFPSETNLSKEMESVMKDIKNTTQKKYRDYSKTPGSPDNDFLFMYSVARTNLELELIHRGGNLCSGGASTAGKRSCLNQLFHVLALHMRLYSIDSEYNPWRKLTQLEEMNPQLGYEEQQPEVPILYHDVTSLLLIQILMMPQPLRKDHFTCIVKVLFTLLYTQALAALSVKCSEEDRSAWKHAGALKKSTCDAEKSYEVLLSFVISELFKGKLYHEEGTQECAMVNPIAWSPESMEKCLQDFCLPFLRITSLLQHHLFGEDLPSCQEEEEFSVLASCLGLLPTFYQTEHPFISASCLDWPVPAFDIITQWCFEIKSFTERHAEQGKALLIQESKWKLPHLLQLPENYNTIFQYYHRKTCSVCTKVPKDPAVCLVCGTFVCLKGLCCKQQSYCECVLHSQNCGAGTGIFLLINASVIIIIRGHRFCLWGSVYLDAHGEEDRDLRRGKPLYICKERYKVLEQQWISHTFDHINKRWGPHYNGL

SEQ ID NO: 2356 - protein, 118 aa, Homo sapiens
MRGERRPLWEEESNAKGGVWKMKVPKDSTSTVWKELLLATIGEQFTDCAAADDEVIGVSVSVRDREDVVQVWNVNASLVGEATVLEKIYELLPHITFKAVFYKPHEEHHAFEGGRGKH

SEQ ID NO: 2357 - protein, 114 aa, Homo sapiens
MALEHLVVWRVHSEDQSFVVLKTDLGRRGCRPLRKTAPKAKEAPAPPKAEAKVKALKAKKAVLKGVRSHTQKRRSACHSPSGGPRHCGSGGSPDILGRAPPGETSLATMLSSFR

SEQ ID NO: 2358 - protein, 133 aa, Homo sapiens [sequence omitted]

SEQ ID NO: 2359 - protein, 111 aa, Homo sapiens
MGHKECGRIWGKPQGCAFPEAEVVMLLVVRNCQFREEQDDGRSPWIPRPRWSPKSYPLPPSPQGIVQGFLLWPRGPRCFLRLPRPSSSRLYNGGPDLGAFLGSSCIRVFGS

SEQ ID NO: 2360 - protein, 349 aa, Homo sapiens
MRLMLRLGAEYKAYPAPLTSIRGRKPLFGEIGHTIMNLLVDLRNYQYTLHNIDQLLIHMEMGKSCIKIPRKKYSDVMKVLNSSNEHVISIGASFSTEADSHLVCIQNDGIYETQANSATGHPRKVTGASFVVFNGALKTSSGFLAKSSIVEDGLMVQITPETMNGLRLALREQKDFKITCGKVDAVDLREYVDICWVDAEEKGNKGVISSVDGISLQGFPSEKIKLEADFETDEKIVKCTEVFYFLKDQDLSILSTSYQFAKEIAMACSAALCPHLKTLKSNGMNKIGLRVSIDTDMVEFQAGSEGQLLPQHYLNDLDSALIPVIHGGTSNSSLPLEIELVFFIIEHLF

SEQ ID NO: 2361 - protein, 134 aa, Homo sapiens
MAGVPGEAAGGPASMSRAGMLGVVCTLLVWAYLAVGKLVVRMTFTELCTHHPWSLRCESFCRSRVTACLPAPAPWLRPFLCPMLFSDRNPVECHLFGEAVSDPVCKGLLPHYFWHPTFFPVKANCLVSFCPTTV

SEQ ID NO: 2362 - protein, 223 aa, Homo sapiens [sequence omitted]

SEQ ID NO: 2363 - protein, 213 aa, Homo sapiens [sequence omitted]

SEQ ID NO: 2364 - protein, 960 aa, Homo sapiens [sequence omitted]

SEQ ID NO: 2365 - protein, 342 aa, Homo sapiens [sequence omitted]

SEQ ID NO: 2366 - protein, 215 aa, Homo sapiens
MHVCTGASKPLVSTPFHPTPTSLISAPSLGCAPLLSARGCLHVGVCMWVSVPSSVSCLHVGVCTLTCLVSAQACVGVPAGLFGGRPVILEVTHVFCGCLLLAPHSVEMGLHWPRLSPAHPPPSLPASKPRNSGFRGPSQVSTWQQCLQTPGWPICPPAPLSDLSLPGCPCLHPSSPSHCRCLPTSHPWVPSQPLWPPQLGPLSSRLPHPVLLPPS

SEQ ID NO: 2367 - protein, 334 aa, Homo sapiens
MHRELVFRFIEVQTLLLAPFCPHLCEHIWTLLGKPDSIMNASWPVAGPVNEVLIHSSQYLMEVTHDLRLRLKNYMMPAKGKKTDKQPLQKPSHCTIYVAKNYPPWQHTTLSVLRKHFEANNGKLPDNKVIASELGSMPELKKYMKKVMPFVAMIKENLEKMGPRILDLQLEFDEKAVLMENIVYLTNSLELEHIEVKFASEAEDKIREDCCPGKPLNVFRIEPGVSVSLVNPQPSNGHFSTKIEIRQGDNCDSIIRRLMKMNRGIKDLSKVKLMRFDDPLLGPRRVPVLGKEYTEKTPISEHAVFNVDLMSKKIHLTENGIRVDIGDTIIYLVH

SEQ ID NO: 2368 - protein, 238 aa, Homo sapiens
MMQTFNGAPKNKDVQCDKIIMEDKGIMSTAWDLYDSYNAMELVSLSVKQSVVESSSKANVLPKDQDQRLPGSTTEKNSETSSLMDIENVILAKIHEDEEDHSDAILKSDKFHQDLFFMERVLMENIFQPKLAAYRQLPVLKEPEPEEPEDVLESAKHEEVEEESKKEEEEEIHAEESTIPANLERLWSFSCDLTKGLNVSSLAWNKTNPDLLAVGYGHFGFKEQKRGLACCWSIKNPM

SEQ ID NO: 2369 - protein, 581 aa, Homo sapiens
MDSDDVRQAARLLLPGVDCEPRQLRADDCFCASRKLDAVAIEAKFKQDLGFRMLNCGRTDLVKQAVSLLGPDGINTMSEQGMTPLMYACVRGDEAMVQMLLDAGADLNVEVVSTPHKYPSVHPETRHWTALTFAVLHGHIPVVQLLLDAGAKVEGSVEHGEENYSETPLQLAAAVGNFELVSLLLERGADPLIGTMYRNGISTTPQGDMNSFSQAAAHGHRNVFRKLLAQPEKEKSDILSLEEILAEGTDLAETAPPPLCASRNSKAKLRALREAMYHSAEHGYVDVTIDIRSIGVPWTLHTWLESLRIAFQQHRRPLIQCLLKEFKTIQEEEYTEELVTQGLPLMFEILKASKNEVISQQLCVIFTHCYGPYPIPKLTEIKRKQTSRLDPHFLNNKEMSDVTFLVEGRPFYAHKVLLFTASPRFKALLSSKPTNDGTCIEIGYVKYSIFQLVMQYLYYGGPESLLIKNNEIMELLSAAKFFQLEALQRHCEIICAKSINTDNCVDIYNHAKFLGVTELSAYCEGYFLKNMMVLIENEAFKQLLYDKNGEGTGQDVLQDLQRTLAIRIQSIHLSSSKGSVV

SEQ ID NO: 2370 - protein, 333 aa, Homo sapiens
METYITYRITTKSTRVEFDLPEYSVRRRYQDFDWLRSKLEESQPTHLIPPLPEKFVVKGVVDRFSEEFVETRRKALDKFLKRITDHPVLSFNEHFNIFLTAKDLNAYKKQGIALLTRMGESVKHVTGGYKLRTRPLEFAAIGDYLDTFALKLGTIDRIAQRIIKEEIEYLVELREYGPVYSTWSALEGELAEPLEGVSACIGNCSTALEELADDMTEDFLPVLREYILYSDSMKSVLKKRDQVQAEYEAKLEAVALRKEDRPKVPADVEKCQDRMECFNADLKADMERWQNNKRQDFRQLLMGMADKNIQYYEKCLMAWESIIPLLQEKQEAK

SEQ ID NO: 2371 - protein, 769 aa, Homo sapiens
MGCNMCVVQKPEEQYKVMLQVNGKELSKLSQEQTLQALRSSKEPLVIQVLRRSPRLRGDSSCHDLQLVDSGTQTDITFEHIMALGKLRPPTPPMVILEPPPISHEYYDPAEFMEGGPQEADRLDELEYEEVELYKSSHRDKLGLMVCYRTDDEEDLGIYVGEVNPNSIAAKDGRIREGDRIIQINGVDVQNREEAVAILSQEENTNISLLVARPESQLAKRWKDSDRDDFLDDFGSENEGELRARKLKSPPAQQPGNEEEKGAPDAGPGLSNSQELDSGVGRTDESTRNEESSEHDLLGDEPPSSTNTPGSLRKFGLQGDALQSRDFHFSMDSLLAEGAGLGGGDVPGLTDEEYERYRELLEIKCHLENGNQLGLLFPRASGGNSALDVNRNESLGHEMAMLEEELRHLEFKCRNILRAQKMQQLRERCMKAWLLEEESLYDLAASEPKKHELSDISELPEKSDKDSTSAYNTGESCRSTPLLVEPLPESPLRRAMAGNSNLNRTPPGPAVATPAKAAPPPGSPAKFRSLSRDPEAGRRQHAEERGRRNPKTGLTLERVGPESSPYLSRRHRGQGQEGEHYHSCVQLAPTRGLEELGHGPLSLAGGPRVGGVAAAATEAPRMEWKVKVRSDGTRYVAKRPVRDRLLKARALKIREERSGMTTDDDAVSEMKMGRYWSKEERKQHLIRAREQRKRREFMMQSRLECLREQQNGDSKPELNIIALSHRKTMKKRNKKILDNWITIQEMLAHGARSADGKRVYNPLLSVTTV

SEQ ID NO: 2372 - protein, 138 aa, Homo sapiens [sequence omitted]

SEQ ID NO: 2373 - protein, 335 aa, Homo sapiens
MLALASHLSTVESEKQKLRAQVRRLCQENQWLRDELAGTQQRLQRSEQAVAQLEEEKKHLEFLGQLRQYDEDGHTSEEKEGDATKDSLDDLFPNEEEEDPSNGLSRGQGATAAQQGGYEIPARLRTLHNLVIQYAAQGRYEVAVPLCKQALEDLERTSGRGHPDVATMLNILALVYRDQNKYKEAAHLLNDALSIRESTLGPDHPAVAATLNNLAVLYGKRGKYKEAEPLCQRALEIREKVLGTNHPDVAKQLNNLALLCQNQGKYEAVERYYQRALAIYEGQLGPDNPNVARTKNNLASCYLKQGKYAEAETLYKEILTRAHVQEFGSVDEPAP

SEQ ID NO: 2374 - protein, 641 aa, Homo sapiens
MTFQVWGWRREDASQVLAWVPDAEGGRRGMLTRRSLATKDPTAVERANLLNMAKLSIKGLIESALSFGRTLDSDYPPLQQFFVVMEHCLKHGLKVRKSFLSYNKTIWGPLELVEKLYPEAEEIGASVRDLPGLKTPLGRARAWLRLALMQKKMADYLRCLIIQRDLLSEFYEYHALMMEEEGAVIVGLLVGLNVIDANLCVKGEDLDSQVGVIDFSMYLKNEEDIGNKERNVQIAAILDQKNYVEELNRQLNSTVSSLHSRVDSLEKSNTKLIEELAIAKNNIIKLQEENHQLRSENKLILMKTQQHLEVTKVDVETELQTYKHSRQGLDEMYNEARRQLRDESQLRQDVENELAVQVSMKHEIELAMKLLEKDIHEKQDTLIGLRQQLEEVKAINIEMYQKLQGSEDGLKEKNEIIARLEEKTNKITAAMRQLEQRLQQAEKAQMEAEDEDEKYLQECLSKSDSLQKQISQKEKQLVQLETDLKIEKEWRQTLQEDLQKEKDALSHLRNETQQIISLKKEFLNLQDENQQLKKIYHEQEQALQELGNKLSESKLKIEDIKEANKALQGLVWLKDKEATHCKLCEKEFSLSKRKHHCRNCGEIFCNACSDNELPLPSSPKPVRVCDSCHALLIQRCSSNLP

SEQ ID NO: 2375 - protein, 1015 aa, Homo sapiens
MPEEEKLVNYYSCSYWKGKVPRQGWMYLSINHLCFYSFLMGREAKLVIRWVDITQLEKNATLLLPDVIKVSTRSSEHFFSVFLNINETFKLMEQLANIAMRQLLDNEGFEQDRSLPKLKRKSPKKVSALKRDLDARAKSERYRALFRLPKDEKLDGHTDCTLWTPFNKMHILGQMFVSTNYICFTSKEENLCSLIIPLREVTIVEKADSSSVLPSPLSISTRNRMTFLFANLKDRDFLVQRISDFLQQTTSKIYSDKEFAGSYNSSDDEVYSRPSSLVSSSPQRSTSSDADGERQFNLNGNSVPTATQTLMTMYRRRSPEEFNPKLAKEFLKEQAWKIHFAEYGQGICMYRTEKTRELVLKGIPESMRGELWLLLSGAINEKATHPGYYEDLVEKSMGKYNLATEEIERDLHRSLPEHPAFQNEMGIAALRRVLTAYAFRNPNIGYCQAMNIVTSVLLLYAKEEEAFWLLVALCERMLPDYYNTRVVGALVDQGVFEELARDYVPQLYDCMQDLGVISTISLSWFLTLFLSVMPFESAVVVVDCFFYEGIKVIFQLALAVLDANVDKLLNCKDDGEAMTVLGRYLDSVTNKDSTLPPIPHLHSLLSDDVEPYPEVDIFRLIRTSYEKFGTIRADLIEQMRFKQRLKVIQTLEDTTKRNVVRTIVTETSFTIDELEELYALFKAEHLTSCYWGGSSNALDRHDPSLPYLEQYRIDFEQFKGMFALLFPWACGTHSDVLASRLFQLLDENGDSLINFREFVSGLSAACHGDLTEKLKLLYKMHVLPEPSSDQDEPDSAFEATQYFFEDITPECTHVVGLDSRSKQGADDGFVTVSLKPDKGKRANSQENRNYLRLWTPENKSKSKNAKDLPKLNQGQFIELCKTMYNMFSEDPNEQELYHATAAVTSLLLEIGEVGKLFVAQPAKEDKLHCEDIGEDTVLVRSGQGTAALPRSTGLDRDWAITFEQFLASLLTEPALVKYFDKPVCMMARITSAKNIRMMGKPLTSASDYEISAMSG

SEQ ID NO: 2376 - protein, 151 aa, Homo sapiens
MGTGGQQGPGQSAMLRTPRLLPQPLATLYRGRGRPVKFAKPDPAAWWGWLGYSFTKLCFTASPLYTPIPCLPPFSWTVCPFGRKKTSPTRAKGSRALPSERLWGSGSVLCLTSPGEGDIWLEDWNLIAIVFDFVTFLLGSVNYPPPRLPAP

SEQ ID NO: 2377 - protein, 149 aa, Homo sapiens [sequence omitted]

SEQ ID NO: 2378 - protein, 154 aa, Homo sapiens
MCTVAHTCIEHMCTYMRLHPLAHPHTCALAPICTHVHTLAHMCICRNAPLHLCDTPAHLHTPICIQAQTHSHTFAHTATNLHKQHLYTDTYPFVPIQCTLTHLHTAVLAHTFAHTHLHTCTHTTHLSVQHTYLCAYMHICTCTQQWHTLLYHSP

SEQ ID NO: 2379 - protein, 764 aa, Homo sapiens [sequence omitted]

SEQ ID NO: 2380 - protein, 412 aa, Homo sapiens [sequence omitted]

SEQ ID NO: 2381 - protein, 196 aa, Homo sapiens
MEECPRSRSGAEGPVGSALQSTGSCPAPRLPPPSAHWPALCSLHSRHRHPHLWSEHPCAWSGHIGQQPLLWGIFSTRPRLCWCWTVRIGGPFIFHWCGIQDPRGSTATAGPKAAHPQKVAFVPCPCSPHPFPKSGPWHVLERALDPSSCVKQTYPGSLASAARGQWQPWGPFPSGGSTSLREGEAGCGGPKPGTST

SEQ ID NO: 2382 - protein, 108 aa, Homo sapiens
MPRQWSLLCHFVTSSFSVHLACSFLCVRDFPWMHIYVSASQEKLLEVFCVCVGILGLPVGQTWRAGFYAWESAQVRPFRSFGECGSISPEMDSVWLDGGSMSRAVDWA

SEQ ID NO: 2383 - protein, 110 aa, Homo sapiens
MVLLASPGLVEAQKPGVPHLGSLIDRDCLHKMCLEMSGGTSACHHDWGHFLGQSQVCSRPYNIQGRATKQRFYLYQNAKEPLSRNATQSPFRRIFQNKAAVCPQRSTEDF

SEQ ID NO: 2384 - protein, 212 aa, Homo sapiens [sequence omitted]

SEQ ID NO: 2385 - protein, 418 aa, Homo sapiens [sequence omitted]

SEQ ID NO: 2386 - protein, 130 aa, Homo sapiens [sequence omitted]

SEQ ID NO: 2387 - protein, 399 aa, Homo sapiens [sequence omitted]

SEQ ID NO: 2388 - protein, 206 aa, Homo sapiens
MSQKPAKEGPRLSKNQKYSEHFSIHCCPPFTFLNSKKEIEDRKYSICKSGCFYQKKEEDWICCACQKTSSCQRRLSSRGEPWLPPPASFGPLRTSRRAKSPQRPKQQPAAPPAVVRAPAKPRSPPRSERQPRSPPRSERQPRSPPRSERQPRSPPRSERQPRPRPEVRPPPAKQRPPQKSKQQPRSSPLRGPGASRGGSPVKASRF

SEQ ID NO: 2389 - protein, 865 aa, Homo sapiens
MWQEAMRRRRYLRDRSEEAAGGGDGLPRSRDWLYESYYCMSQQHPLIVFLLLIVMGSCLALLAVFFALGLEVEDHVAFLITVPTALAIFFAIFILVCIESVFKKLLRLFSLVIWICLVAMGYLFMCFGGTVSPWDQVSFFLFIIFVVYTMLPFNMRDAIIASVLTSSSHTIVLSVCLSATPGGKEHLVWQILANVIIFICGNLAGAYHKHLMELALQQTYQDTCNCIKSRIKLEFEKRQQERLLLSLLPAHIAMEMKAEIIQRLQGPKAGQMENTNNFHNLYVKRHTNVSILYADIVGFTRLASDCSPGELVHMLNELFGKFDQIAKENECMRIKILGDCYYCVSGLPISLPNHAKNCVKMGLDMCEAIKKVRDATGVDINMRVGVHSGNVLCGVIGLQKWQYDVWSHDVTLANHMEAGGVPGRVHISSVTLEHLNGAYKVEEGDGDIRDPYLKQHLVKTYFVINPKGERRSPQHLFRPRHTLDGAKMRASVRMTRYLESWGAAKPFAHLHHRDSMTTENGKISTTDVPMGQHNFQNRTLRTKSQKKRFEEELNERMIQAIDGINAQKQWLKSEDIQRISLLFYNKVLEKEYRATALPAFKYYVTCACLIFFCIFIVQILVLPKTSVLGISFGAAFLLLAFILFVCFAGQLLQCSKKASPLLMWLLKSSGIIANRPWPRISLTIITTAIILMMAVFNMFFLSDSEETIPPTANTTNTSFSASNNQVAILRAQNLFFLPYFIYSCILGLISCSVFLRVNYELKMLIMMVALVGYNTILLHTHAHVLGDYSQVLFERPGIWKDLKTMGSVSLSIFFITLLVLGRQNEYYCRLDFLWKNKFKKEREEIETMENLNRVLLENVPSRARG

SEQ ID NO: 2390 - protein, 131 aa, Homo sapiens
MMDDDTELRTDGNSLLKAVWLGRLRLTRLLLEGGAYINESNDKGETALMVACITKHVDQQSISKSKMVKYLLDNRADPNIQDKSGKTALIHACIRRAGGEVVSLLLENGADPSLEDRTGASALVYAINADD

SEQ ID NO: 2391 - protein, 232 aa, Homo sapiens [sequence omitted]

SEQ ID NO: 2392 - protein, 330 aa, Homo sapiens
MDQGDTPTLEEDLKKLQLSEFFDIFEKEKVDKEALALCTDRDLQEIGIPLGPRKKILNYFSTRKNSMGIKRPAPQPASGANIPKESEFCSSSNTRNGDYLDVGIGQVSVKYPRLIYKPEIFFAFGSPIGMFLTVRGLKRIDPNYRFPTCKGFFNIYHPFDPVAYRIEPMVVPGVEFEPMLIPHHKGRKRMHLELREGLTRMSMDLKNNLLGSLRMAWKSFTRAPYPALQASETPEETEAEPESTSEKPSDVNTEETSVAVKEEVLPINVGMLNGGQRIDYVLQEKPIESFNEYLFALQSHLCYWESEDTVLLVLKEIYQTQGIFLDQPLQ

SEQ ID NO: 2393 - protein, 131 aa, Homo sapiens
MPSPWGQTLPVQMESCDLSIVSLKVNEVEEVHWCLLISLLSGRKEGITPWTQTSAGSLRRELMSMTSEKGKRAFMLFMYTQAMARQVRNGLWLPSPGEDKQSGRRQASCKTLSCRHHQYQVSCLRSFGDSG

SEQ ID NO: 2394 - protein, 509 aa, Homo sapiens
MREKSFQCIESGKSFNCSSLLKKHQITHLEEKQCKCDVYGKVFNQKRYLACHRRSHIDEKPYKCNECGKIFGHNTSLFLHKALHTADKPYECEECDKVFSRKSHLETHKIIYTGGKPYKCKVCDKAFTCNSYLAKHTIIHTGEKPYKCNECGKVFNRLSTLARHRRLHTGEKPYECEECEKVFSRKSHLERHKTIHTGEKPYKCKVCDKAFAYNSYLAKHSIIHTGEKPYKCNECGKVFNQQSTLARHHRLHTAEKPYKCEECDKVFRCKSHLERHRRIHTGEKPYKCKVCDKAFRSDSCLTEHQRVHTGEKPYTCNECGKVFSTKANLACHHKLHTAEKPYKCEECEKVFSRKSHMERHRRIHTGEKPYKCKVCDKAFRRDSHLAQHQRVHTGEKPYKCNECGKTFRQTSSLIIHRRLHTGEKPYKCNECGKTFSQMSSLVYHHRLHSGEKPYKCNECGKVFNQQAHLAQHQRVHTGEKPYKCNECGKTFSQMSNLVYHHRLHSGEKP

SEQ ID NO: 2395 - protein, 1032 aa, Homo sapiens [sequence omitted]

SEQ ID NO: 2396 - protein, 1299 aa, Homo sapiens [sequence omitted]

SEQ ID NO: 2397 - protein, 1173 aa, Homo sapiens [sequence omitted]

SEQ ID NO: 2398 - protein, 1225 aa, Homo sapiens [sequence omitted]

SEQ ID NO: 2399 - protein, 228 aa, Homo sapiens [sequence omitted]

SEQ ID NO: 2400 - protein, 929 aa, Homo sapiens [sequence omitted]

SEQ ID NO: 2401 - protein, 410 aa, Homo sapiens
MANLGHLSLKSWAQHPARNYLLQAVRLYCELQASKETDMELVQVFLWLAQVLVSGHQLTHGLLCYEMALLFGLRHRHLKSQLQATKSLCHFYSSVSPNPEACITYHEHWLALAQQLRDREMEGRLLESLGQLYRNLNTARSLRRSLTCIKESLRIFIDLGETDKAAEAWLGAGRLHYLMQEDELVELCLQAAIQTALKSEEPLLALKLYEEAGDVFFNGTRHRHHAVEYYRAGAVPLARRLKAVRTELRIFNKLTELQISLEGYEKALEFATLAARLSTVTGDQRQELVAFHRLATVYYSLHMYEMAEDCYLKTLSLCPPWLQSPKEALYYAKVYYRLGRLTFCQLKDAHDATEYFLLALAAAVLLGDEELQDTIRSRLDNICQSPLWHSRPSGCSSERARWLSGGGLAL

SEQ ID NO: 2402 - protein, 133 aa, Homo sapiens [sequence omitted]

SEQ ID NO: 2403 - protein, 126 aa, Homo sapiens
MWRRHSGSPQSLNVPALVQGLVLRSDLAVSGTGTQGCPAIPPPGAEELSPAAAAAQSPRWSLGRQAQCSQLITRHSVLRLISLDLFLSEKVLFPLGCVGCSGSANSSIWVLSEYEILKCGKKKTNF

SEQ ID NO: 2404 - protein, 165 aa, Homo sapiens [sequence omitted]

SEQ ID NO: 2405 - protein, 114 aa, Homo sapiens
MYVWPIIYLTIPLLLDLQIFFFSFFFFETEARSVPQAGVQWRDLGPLQTPPPRFKRFSFLSLPSSWDYRSPPPRLANFCIFSRDGVSPYWPGWSRTPDLVIRPPRPPKVLGLQA

SEQ ID NO: 2406 - protein, 693 aa, Homo sapiens
MHSSGVSRGGSGFSASYNCQEPPSSHIQPGLCGLGNLGNTCFMNSALQCLSNTAPLTDYFLKDEYEAEINRDNPLGMKGEIAEAYAELIKQMWSGRDAHVAPRMFKTQVGRFAPQFSGYQQQDSQELLAFLLDGLHEDLNRVKKKPYLELKDANGRPDAVVAKEAWENHRLRNDSVIVDTFHGLFKSTLVCPECAKVSVTFDPFCYLTLPLPLKKDRVMEVFLVPADPHCRPTQYRVTVPLMGAVSDLCEALSRLSGIAAENMVVADVYNHRFHKIFQMDEGLNHIMPRDDIFVYEVCSTSVDGSECVTLPVYFRERKSRPSSTSSASALYGQPLLLSVPKHKLTLESLYQAVCDRISRYVKQPLPDEFGSSPLEPGACNGSRNSCEGEDEEEMEHQEEGKEQLSETEGSGEDEPGNDPSETTQKKIKGQPCPKRLFTFSLVNSYGTADINSLAADGKLLKLNSRSTLAMDWDSETRRLYYDEQESEAYEKHVSMLQPQKKKKTTVALRDCIELFTTMETLGEHDPWYCPNCKKHQQATKKFDLWSLPKILVVHLKRFSYNRYWRDKLDTVVEFPIRGLNMSEFVCNLSARPYVYDLIAVSNHYGAMGVGHYTAYAKNKLNGKWYYFDDSNVSLASEDQIVTKAAYVLFYQRRDDEFYKTPSLSSSGSSDGGTRPSSSQQGFGDDEACSMDTN

SEQ ID NO: 2407 - protein, 617 aa, Homo sapiens [sequence omitted]

SEQ ID NO: 2408 - protein, 752 aa, Homo sapiens [sequence omitted]

SEQ ID NO: 2409 - protein, 333 aa, Homo sapiens [sequence omitted]

SEQ ID NO: 2410 - protein, 390 aa, Homo sapiens
MEDNAFRTDNGNNLLPFQDRSRPYDTFNLHSLENSLMDMIRTDHEPLKGKHYPPSGPPMSFADIMWRNHFAGRMGINFHHPGTDNIMALNSRSSLFPFEDAFLDDSHGDQALSSGLSSPTRCQNGERVERYSRKVFVGGLPPDIDEDEITASFRRFGPLVVDWPHKAESKSYFPPKGYAFLLFQEESSVQALIDACLEEDGKLYLCVSSPTIKDKPVQIRPWNLSDSDFVMDGSQPLDPRKTIFVGGVPRPLRAVELAMIMDRLYGGVCYAGIDTDPELKYPKGAGRVAFSNQQSYIAAISARFVQLQHNDIDKRVEVKPYVLDDQMCDECQGTRCGGKFAPFFCANVTCLQYYCEYCWASIHSRAGREFHKPLVKEGGDRPRHVPFRWS

SEQ ID NO: 2411 - protein, 874 aa, Homo sapiens
MANLKIELSKLDSEAWPGALDIEKEKLMLINEKEELLKELQFVTPQKRTQDELERLEAERQRLEEELLSVRGTPSRALAERLRLEERRKELLQKLEETTKLTTYLHSQLKSLSASTLSMSSGSSLGSLASSRGSLNTSSRGSLNSLSSTELYYSSQSDQIDVDYQYKLDFLLQEKSGYIPSGPITTIHENEVVKSPSQPGQSGLCGVAAAATGHTPPLAEAPKSVASLSSRSSLSSLSPPGSPLVLEGTFPMSSSHDASLHQFTADFEDCELSSHFADISLIENQILLDSDSGGASQSLSEDKDLNECAREPLYEGTADVEKSLPKRRVIHLLGEKTTCVSAAVSDESVAGDSGVYEAFVKQPSEMEDVTYSEEDVAIVETAQVQIGLRYNAKSSSFMVIIAQLRNLHAFLIPHTSKVYFRVAVLPSSTDVSCLFRTKVHPPTESILFNDVFRVAISQTALQQKTLRVDLCSVSKHRREECLAGTQISLADLPFSSEVFTLWYNLLPSKQMPCKKNEENEDSVFQPNQPLVDSIDLDAVSALLARTSAELLAVEQELAQEEEEESGQEEPRGPDGDWLTMLREASHEIVAEKEAEVKLPEDSSCTEDLSSCTSVPEMNEDGNRKESNCAKDLRSQPPTRIPTLVDKETNTDEAANDNMAVRPKERSSLSSRQHPFVRSSVIVRSQTFSPGERNQYICRLNRSDSDSSTLAKKSLFVRNSTERRSLRVKRTVCQSVLRRTTQECPVRTSLDLELDLQASLTRQSRLNDELQALRDLRQKLEELKAQGETDLPPGVLEDERFQRLLKQAEKQAEQSKEEQKQGLNAEKLMRQVSKDVCRLREQSQKVPRQVQSFREKIAYFTRAKISIPSLPADDV

SEQ ID NO: 2412 - protein, 428 aa, Homo sapiens [sequence omitted]

SEQ ID NO: 2413 - protein, 685 aa, Homo sapiens
MPAYTHASPIHNTHKPYECKECGKYFSCGSNLIQHQSIHTGEKPYKCKECGKAFQLHIQLTRHQKFHTGEKTFECKECGKAFNLPTQLNRHKNIHTVKKLFECKECGKSFNRSSNLTQHQSIHAGVKPYQCKECGKAFNRGSNLIQHQKIHSNEKPFVCRECEMVFRYHYQLIEHCRIHTGEKPFECKECRKAFTLLTKLVRHQKIHMGEKPFECRECGKAFSLLNQLNRHKNIHTGEKPFECKECGKSFNRSSNLIQHQGIHADVKPYECKECGKGFNRGANLIQHQKIHSNEKPFVCRECEMAFRYHYQLIQHCQIHTGGKPFECKECGKAFSLLTQLARHKNIHTGEKPFECKDCGKAFNRGSNLVQHQSIHTGEKPYECKECGKAFRLHLQLSQHEKTHTGEKPFECKECGKFFRRGSNLNQHRSIHTGKKPFECKECGKAFRLHMHLIRHQKFHTGEEPFECKECGKAFSLHTQLNHHKNIHTGEKPFKCKECGKSFNRVSNLVQHQSIHAGVKPYECKECGKGFSRVSNLIQHQKTHSSAKPFVCKECRKTFRYHYQLTEHYRIHTGEKPFECKECGKAFGLLTQLAQHQIIHTGEKPFKCKECGKAFNRGSNLVQPQSIHTGEKPYECKECGKAFRLHLQLSLHQKLVQVRNPLNVRNVGQPSDISSNLLNIRKFILG

SEQ ID NO: 2414 - protein, 207 aa, Homo sapiens
MANTEFPGQPLPWTSGLLGPLGHLEQLPELTAQDSIATFSGEGLGDLEAPHGVLGINDAATQLPWGSWGLVSDMATRLPWGSRGSLTPTRGCPGPPRGRQAEVRREHARAPGGHQGAAPASAPPPAPSHTLQCAVPTRPPQEGALAGQLVHDAVISLGVGCCGHHVLWASSAEPCTGWPGAPHAGVSTCLAAHLVRLPFLGPLVQLC

SEQ ID NO: 2415 - protein, 645 aa, Homo sapiens [sequence omitted]

SEQ ID NO: 2416 - protein, 413 aa, Homo sapiens
MTGNPAEEGDVPRSSPPVAFTEVLQAPAIRIPPSSPLCGLGGSPRDQASGPDASEGATGPFLEPSQQQAEATWGVSSENGGGLEAVSGSEELLGEDTIDQELEQLYLSHLSRLRAAVAAGGAGGGGEGSTDGGMSPSHPLGILTDRDLILKWPGPERALNSALAEEITLHYARLGRGVELIKDTEDPDDEGEGEEGLSVTPSSPEGDSPKESPPEILSGARSVVATMGDVWLPWAEGSGCDGPVVLGTEGQFIGDPEKGMGKDTSSLHMNRVIAGVTESLGEAGTEAQIEVTSEWAGSLDPISGKEPASPVLLQGQNPTLLSPLGAEVCLSSVARPHVSSQDEKDAGPSLEPPKKSPTLAVPAECVCALPPQLRGPLTQTLGVLAGLVVVPVALNSGVSLLVLALCLSLAWFS

SEQ ID NO: 2417 - protein, 693 aa, Homo sapiens
MHSSHLNKHEKIHTGEKPYKCKECGKVISSSSSFAKHKRIHTGEKPFKCLECSKAFNISTTLTKHRRIHTGEKPYTCEVCGKAFRQSANLYVHRRIHTGEKPYTCGECGKTFRQSANLYVHRRIHTGEKPYKCEDCGKAFGRYTALNQHKKIHTGEKPYKCEECGKAFNSSTNLTAHKRIHTREKPYTCEDRGRAFGLSTNLNEYKKIHTGDKPYKCKECGKAFIHSLHLNKHEKIHTGKKPYKCKQCGKVITSSSSFAKHKRIHTGEKPFECLECGKAFTSSTTLTKHRGIHTGEKPYTCEVCGKAFRQSAILYVHRRIHTGEKPYTCEECGKTFRQSANLYVHRRIHTGEKPYKCEECGKAFGRYTDLNQHKKIHTGEKLYKCEECGKDFVWYTDLNQQKKIYTGEKPYKCEECGKAFAPSTDLNQHTKILTGEQSYKCEECGKAFGWSIALNQHKKIHTGEKPYKCEECGKAFSRSRNLTTHRRVHTREKPYKCEDRGRSFGWSTNLNEYKKIHTGDKLYKCKECGKVFKQSSHLNRHEKIHTGKKPYKCKECGEVITSSSSLAKHKRIHTGEKPFKCLECGKAFTSSTTLTKHRRIHTGEKPYTCEECGKAFRQSAILYVHRRIHTGEKPYTCGECGKTFRQSANLYAHKKIHTGEKPYTCGDCGKTFRQSANLYAHKKIHTGDKTIQV

SEQ ID NO: 2418 - protein, 147 aa, Homo sapiens
MCPCVQPHLPAEFPAKTLPCSLCGSGIRMGAARKACVCLVMFGASPGRLRSQDWQHPESQSLVCLMVDAACWVGPKLGLSARTPTHDLCKWPGLPSNMVAGFQGQASHERGTWLGRSLVSSVTLPQRTQSVNFTPSVVNTVRVPLRV

SEQ ID NO: 2419 - protein, 899 aa, Homo sapiens
MEQVVSNFPPGSSGALQTQAPQGLKEPSINEYSFPSALCGMTQVASAVAVCGLGEREEVTCSVAPSGSLPPAAEASEAMPPLCGLASMELGKEAIAEGLLKEAALVLTRPNTYSSIGDFLDSMNRRIMETASKSQTLCSENVVRNELAHTLSNVILRHSIDEVHHKNMIIDPNDNRHSSEILDTLMESTNQLLLDVICFTFKKMSHIVRLGECPAVLSKETIRRRETEPSCQPSDPGASQAWTKATESSSSSPLSNSHNTSLVINNLVDGMYSKQDKGGVRPGLFKNPTLQSQLSRSHRVPDSSTATTSSKEIYLKGIAGEDTKSPHHSENECRVSSEGQRSPTVSRSRSGSQEAEESIHPNTQEKYNCATSRINEVQVNLSLLGDDLLLPAQSTLQTKHPDIYCITDFAEELADTVVSMATEIAAICLDNSSGKQPWFCAWKRGSEFLMTPNVPCRSLKRKKESQGSGTAVRKHKPPRLSEIKRKTDEHPELKEKLMNRVVDESMNLEDVPDSVNLFANEVAAKIMNLTEFSMVDGMWQAQGYPRNRLLSGDRWSRLKASSCESIPEEDSEARAYVNSLGLMSTLSQPVSRASSVSKQSSCESITDEFSRFMVNQMENEGRGFELLLDYYAGKNASSILNSAMQQACRKSDHLSVRPSCPSKQSSTESITEEFYRYMLRDIERDSRESASSRRSSQDWTAGLLSPSLRSPVCHRQSSMPDSRSPCSRLTVNVPIKANSLDGFAQNFPQDFLSVQPVSSASSSGLCKSDSCLYRRGGTDHITNMLIHETWASSIEALMRKNKIIVDDAEEADTEPVSGGSPSQAEKCANRLAASRMCSGPTLLVQESLDCPRKDSVTECKQPPVSSLSKTASLTNHSPLDSKKETSSCQDPVPIKPLRP

SEQ ID NO: 2420 - protein, 156 aa, Homo sapiens
MAARFWPPAQTSWLVHGVFGLWGCPSCPLPLPAPGGHCSCCDSWDGRTLGFSGHGLCSSFPLLSLPRDGAEQAPESFCPIPAVPTQGSPGLHCFSPGHPARPSGLALPLAGLALATCPHCACWGPSPAPQVWEGLAPGRSCTMFPGYSSLHPCPLL

SEQ ID NO: 2421 - protein, 182 aa, Homo sapiens
MDLQRPDSYQGGAGPDFNDHVLHKTILVGDSGVGKTSLLVQFDQGKFIPGSFSATVGIGFTNKVVTVDGVRVKLQIWDTAGQERFRSVTHAYYRDAQALLLLYDITNKSSFDNIRAWLTEIHEYAQRDVVIMLLGNKADMSSERVIRSEDGETLAREYGVPFLETSAKTGMNVELAFLAIAK

SEQ ID NO: 2422 - protein, 103 aa, Homo sapiens
MGCQNSSFWELRRALFTEKKSRALGLKGSFTSYGRNMRLRKRCIFLFQRMQFFFSAYQSITYPLEIICKIHEITKTLFNSFQSSMSSNNHYLSLLCIYSEFLS

SEQ ID NO: 2423 - protein, 1332 aa, Homo sapiens
MCFEWFTKGQHDLESDVQQQLFKEKILKLESYEITMNGFNLFKTFFENVNLCDHRLKRQGAQLYVEKLELIGMDFIWKIAMESPDEEIASEAIQLIINYSYINLNPRLKKDSVSLHKKFIADCYTRLEAASSALGGPTLTHAVTRATKMLTATAMPTVATSVQSPYRSTKLVIIERLLLLAERYVITIEDFYSVPRTILPHGASFHGHLLTLNVTYESTKDTFTVEAHSNETIGSVRWKLAKQLCSPVDNIQIFTNDSLLTVNKDQKLLHQLGFSDEQILTVKTSGSGTPSGSSADSSTSSSSSSSGVFSSSYAMEQEKSLPGVVMALVCNVFDMLYQLANLEEPRITLRVRKLLLLIPTDPAIQEALDQLDSLGRKKTLLSESSSQSSKSPSLSSKQQHQPSASSILESLFRSFAPGMSTFRVLYNLEVLSSKLMPTADDDMARSCAKSFCENFLKAGGLSLVVNVMQRDSIPSEVDYETRQGVYSICLQLARFLLVGQTMSTLLDEDLTKDGIEALSSRPFRNVSRQTSRQMSLCGTPEKSSYRQLSVSDRSSIRVEEIIPAARVAIQTMEVSDFTSTVACFMRLSWAAAAGRLDLVGSSQPIKESNSLCPAGIRNRLSSSGSNCSSGSEGEPVALHAGICVRQQSVSTKDSLIAGEALSLLVTCLQLRSQQLASFYNLPCVADFIIDILLGSPSAEIRRVACDQLYTLSQTDTSAHPDVQKPNQFLLGVILTAQLPLWSPTSIMRGVNQRLLSQCMEYFDLRCQLLDDLTTSEMEQLRISPATMLEDEITWLDNFEPNRTAECETSEADNILLAGHLRLIKTLLSLCGAEKEMLGSSLIKPLLDDFLFRASRIILNSHSPAGSAAISQQDFHPKCSTANSRLAAYEVLVMLADSSPSNLQIIIKELLSMHHQPDPALTKEFDYLPPVDSRSSSGFVGLRNGGATCYMNAVFQQLYMQPGLPESLLSVDDDTDNPDDSVFYQVQSLFGHLMESKLQYYVPENFWKIFKMWNKELYVREQQDAYGFFTSLIDQMDEYLKKMGRDQIFKNTFQGIYSDQKICKDCPHRYEREEAFMALNLGVTSCQSLEISLDQFVRGEVLEGSNAYYCEKCKEKRITVKRTCIKSLPSVLVIHLMRFGFDWESGRSIKYDEQIRFPWMLNMEPYTVSGMARQDSSSEVGENGRSVDQGGGGSPRKKVALTENYELVGVIVHSGQAHAGHYYSFIKDRRGCGKGKWYKFNDTVIEEFDLNDETLEYECFGGEYRPKVYDQTNPYTDVRRRYWNAYMLFYQRVSDQNSPVLPKKSRVSVVRQEAEDLSLSAPSSPEISPQSSP

SEQ ID NO: 2424 - protein, 1162 aa, Homo sapiens
MRLEEQKKKLAFLLKDWEECEKGIADSLEKLRTFKKKLSQSLPDHHEELHAEQMRCKELENAVGSWTDDLTQLSLLKDTLSAYISADDISILNERVELLQRQWEELCHQLSLRRQQIGERLNEWAVFSEKNKELCEWLTQMESKVSQNGDILIEEMIEKLKKDYQEEIAIAQENKIRLQQMGERLAKASHESKASEIEYKLGKVNDRWQHLLDLIAARVKKLKETLVAVQQLDKNMSSLRTWLAHIESELAKPIVYDSCNSEEIQRKLNEQQELQRDIEKHSTGVASVLNLCEVLLHDCDACATDAECDSIQQATRNLDRRWRNICAMSMERRLKIEETWRLWQKFLDDYSRFEDWLKSSERTAAFPSSSGVIYTVAKEELKKFEAFQRQVHECLTQLELINKQYRRLARENRTDSACSLKQMVHEGNQRWDNLQKRVTSILRRLKHFIGQREEFETARDSILVWLTEMDLQLTNIEHFSECDVQAKIKQLKAFQQEISLNHNKIEQIIAQGEQLIEKSEPLDAAIIEEELDELRRYCQEVFGRVERYHKKLIRLPLPDDEHDLSDRELELEDSAALSDLHWHDRSADSLLSPQPSSNLSLSLAQPLRSERSGRDTPASVDSIPLEWDHDYDLSRDLESAMSRALPSEDEEGQDDKDFYLRGAVGLSDVMIPESPEAYVKLTENAIKNTSGDHSALESQIRQLGKALDDSRFQIQQTENIIRSKTPTGPELDTSYKGYMKLLGECSSSIDSVKRLEHKLKEEEESLPGFVNLHSTETQTAGVIDRWELLQAQALSKELRMKQNLQKWQQFNSDLNSIWAWLGDTEEELEQLQRLELSTDIQTIELQIKKLKELQKAVDHRKAIILSINLCSPEFTQADSKESRDLQDRLSQMNGRWDRVCSLLEEWRGLLQDALMQCQGFHEMSHGLLLMLENIDRRKNEIVPIDSNLDAEILQDHHKQLMQIKHELLESQLRVASLQDMSCQLLVNAEGTDCLEAKEKVHVIGNRLKLLLKEVSRHIKELEKLLDVSSSQQDLSSWSSADELDTSGSVSPTSGRSTPNRQKTPRGKCSLSQPGPSVSSPHSRSTKGGSDSSLSEPGPGRSGRGFLFRVLRAALPLQLLLLLLIGLACLVPMSEEDYSCALSNNFARSFHPMLRYTNGPPPL

SEQ ID NO: 2425 - protein, 111 aa, Homo sapiens
MKIHSVKGQRCPDHTPKSSKPASRTWSRRAGGSVNIRGTLLILGPSSTSCGSITKDSRTRLISQTWEHCHCHSGAYMDKTKLAWLFGPGVPFPRILRAFCGNLSLKVKNNS

SEQ ID NO: 2426 - protein, 844 aa, Homo sapiens
MPKTEPKGADPESPRREEMGCNADQESQSGPGVPQTQGGEVKPKSPETALEAFKALFIRPPRKGTTADTSELEALKRKMRHEKESLRAVFERSNSKPADGPSDSKSPDHSPTEQDDRTPGRLQAVWPPPKTKDTEEKVGLKYTEAEYQAAILHLKREHKEEIENLQAQFELRAFHIRGEHAMITARLEETIENLKHELEHRWRGGCEERKDVCISTDDDCPPKTFRNVCVQTDRETFLKPCESESKTTRSNQLVPKKLNISSLSQLSPPNDHKDIHAALQPMEGMASNQQKALPPPPASIPPPPPLPSGLGSLSPAPPMPPVSAGPPLPPPPPPPPPLPPPSSAGPPPPPPPPPLPNSPAPPNPGGPPPAPPPPGLAPPPPPGLFFGLGSSSSQCPRKPAIEPSCPMKPLYWTRIQISDRSQNATPTLWDSLEEPDIRDPSEFEYLFSKDTTQQKKKPLSETYEKKNKVKKIIKLLDGKRSQTVGILISSLHLEMKDIQQAIFNVDDSVVDLETLAALYENRAQEDELVKIRKYYETSKEEELKLLDKPEQFLHELAQIPNFAERAQCIIFRSVFSEGITSLHRKVEIITRASKDLLHVKSVKDILALILAFGNYMNGGNRTRGQADGYSLEILPKLKDVKSRDNGINLVDYVVKYYLRYYDQEAGTEKSVFPLPEPQDFFLASQVKFEDLIKDLRKLKRQLEASEKQMVVVCKESPKEYLQPFKDKLEEFFQKAKKEHKMEESHLENAQKSFETTVRYFGMKPKSGEKEITPSYVFMVWYEFCSDFKTIWKRESKNISKERLKMAQESVSKLTSEKKVETKKINPTASLKERLRQKEASVTTN

SEQ ID NO: 2427 - protein, 666 aa, Homo sapiens
MSEYNSEIPVVNLKTSTHQKTPVCSIDGSTPITKSTGDWAEASLQQENAITGKPVPDSLNSTKEFSIKGVQGNMQKQDDTLAELPGSPPEKCDSLGSGVATVKVVLPDDHLKDEMDWQSSALGEITEADSSGESDDTVIEDITADTSFENNKIQAEKPVSIPSAVVKTGEREIKEIPSCEREEKTSKNFEELVSDSELHQDQPDILGRSPASEAACSKVPDTNVSLEDVSEVAPEKPITTENPKLPSTVSPNVFNETEFSLNVTTSAYLESLHGKNVKHIDDSSPEDLIAAFTETRDKGIVDSERNAFKAISEKMTDFKTTPPVEVLHENESGGSEIKDIGSKYSEQSKETNGSEPLGVFPTQGTPVASLDLEQEQLTIKALKELGERQVEKSTSAQRDAELPSEEVLKQTFTFAPESWPQRSYDILERNVKNGSDLGISQKPITIRETTRVDAVSSLSKTELVKKHVLARLLTDFSVHDLIFWRDVKKTGFVFGTTLIMLLSLAAFSVISVVSYLILALLSVTISFRIYKSVIQAVQKSEEGHPFKAYLDVDITLSSEAFHNYMNAAMVHINRALKLIIRLFLVEDLVDSLKLAVFMWLMTYVGAVFNGITLLILAELLIFSVPIVYEKYKTQIDHYVGIARDQTKSIVEKIQAKLPGIAKKKAE

SEQ ID NO: 2428 - protein, 799 aa, Homo sapiens [sequence omitted]

SEQ ID NO: 2429 - protein, 716 aa, Homo sapiens [sequence omitted]

SEQ ID NO: 2430 - protein, 136 aa, Homo sapiens
MKKRFYNAKTVSILLVKQQNNWAISSQLHHQLMPNLESIWLRMEKESLPRSLNFDHHGIYMNWQTKFMLLLKTVSIPRSQAIFTQPGLGSGTPQGYKQSHSALGWAATLSCWGKDGSRQLSWVTAGSSFHKSDLIS

SEQ ID NO: 2431 - protein, 162 aa, Homo sapiens [sequence omitted]

SEQ ID NO: 2432 - protein, 141 aa, Homo sapiens
MGVGCRLSRALLTAVTNVLIFFWCLAFLWGLLILLKYRWRKLEEEEQAMYEMVKKIIDVVQDHYVDWEQDMERYPYVGILHVRDSLIPPQSRRRMKRVWDRAVEFLASNESRIQTESHRVAGEDMLVWRWTKPSSFSDSER

SEQ ID NO: 2433 - protein, 193 aa, Homo sapiens
MSSCPWFLCRPSSLFDSLSCSVAEMLTQHLSCVCHSPASVPHLYSKIPILVITSFTFFFLYLWDEHFLKNDHTVIQVGIIANTWSSVASEPQCCLSFSFFFFFFFLRWSLALSPRLECSGAISAHCHLGLPGSSNSYTSASQLAGIIGDHHHGWLIFVFLVEMRFHHVGQAGLEHLNSSDPPPRPPKVLGLQA

SEQ ID NO: 2434 - protein, 158 aa, Homo sapiens
MHRPLLPLACQGPFIFLSYVVLSKEVRKALKLACSRKPSPDPALTTKSTLTSSYNCPSPYADGRLYQPYGDSAGSLHSTSRSGKSQPSYIPFLLREESALNPGQGPPGLGDPGSLFLEGQDQQHGEDRTLWPPSRAVGWLLLKVGGGGWAGCDLSLAS

SEQ ID NO: 2435 - protein, 201 aa, Homo sapiens
MEEEETQLEEKNSLRVEGDNIYVRHSNLMLEELDKAQEDILKHQASISELKRNFMESTPEPRPNEWEKRRITPLSLQTQGTRAPESEGPCTGARDAVKPPVVKTEMVTISDASQRTEISTKEVPIVQTETKTITYESPQTVKGGISETRIEKRIVITGDGDIDHDQALAQAIREAREQHPDMSVTRVVVHKETELAEEGED

SEQ ID NO: 2436 - protein, 926 aa, Homo sapiens
MCCVSPFYSLTKKSQCCFLSQCREVIQNSKEVLSLLQEKNPAFKPVLAIIQAGDDNLMQEINQNLAEEAGLNITHICLPPDSSEAEIIDEILKINEDTRVHGLALQISENLFSNKVLNALKPEKDVDGVTDINLGKLVRGDAHECFVSPVAKAVIELLEKSVGVNLDGKKILVVGAHGSLEAALQCLFQRKGSMTMSIQWKTRQLQSKLHEADIVVLGSPKPEEIPLTWIQPGTTVLNCSHDFLSGKVGCGSPRIHFGGLIEEDDVILLAAALRIQNMVSSGRRWLREQQHRRWRLHCLKLQPLSPVPSDIEISRGQTPKAVDVLAKEIGLLADEIEIYGKSKAKVRLSVLERLKDQADGKYVLVAGITPTPLGEGKSTVTIGLVQALTAHLNVNSFACLRQPSQGPTFGVKGGAAGGGYAQVIPMEEFNLHLTGDIHAITAANNLLAAAIDTRILHENTQTDKALYNRLVPLVNGVREFSEIQLARLKKLGINKTDPSTLTEEEVSKFARLDIDPSTITWQRVLDTNDRFLRKITIGQGNTEKGHYRQAQFDIAVASEIMAVLALTDSLADMKARLGRMVVASDKSGQPVTADDLGVTGALTVLMKDAIKPNLMQTLEGTPVFVHAGPFANIAHGNSSVLADKIALKLVGEEGFVVTEAGFGADIGMEKFFNIKCRASGLVPNVVVLVATVRALKMHGGGPSVTAGVPLKKEYTEENIQLVADGCCNLQKQIQITQLFGVPVVAALNVFKTDTRAEIDLVCELAKRAGAFDAVPCYHWSVGGKGSVDLARAVREAASKRSRFQFLYDVQVPIVDKIRTIAQAVYGAKDIELSPEAQAKIDRYTQQGFGNLPICMAKTHLSLSHQPDKKGVPRDFILPISDVRASIGAGFIYPLVGTMSTMPGLPTRPCFYDIDLDTETEQVKGLF

SEQ ID NO: 2437 - protein, 106 aa, Homo sapiens [sequence omitted]

SEQ ID NO: 2438 - protein, 153 aa, Homo sapiens [sequence omitted]

SEQ ID NO: 2439 - protein, 315 aa, Homo sapiens
MSLGYGLCIVSPDTFTEGRVHACFPFLFVSLSVPSQALGFSPKSSLPVSLFPPYSGMNSLGISHKLTLAPLKHPTVTFKLYDTDRNGILDSSVSWGPCMLGKGICVNLSAPSCPNSSRVLRNRRGWGERLSPLGLNLKVSPKLLTPQRECWIHELGLPYKHTNTFIYLADIPENERCESGVEPRNTDFWKRVWMVVVKGIWLWLLPFLLQEVDKIILQMMRVAEYLDWDVSELRPILQEMMKEIDYDGSGSVSQAEWVRAGATTVPLLVLLGLEMTLKDDGQHMWRPKRFPRPVYCNLCESSIGLGKQGLSCNRE

SEQ ID NO: 2440 - protein, 822 aa, Homo sapiens [sequence omitted]

SEQ ID NO: 2441 - protein, 186 aa, Homo sapiens
MFGKPDKMDVRCHSDAEAARVSKNAHKESRESKGAEGNLPAAFLKEPQGAFSASGAAEDCNKSKSNSAADPDYCRRILVRDAKGSIREIILPKGLDLDRPKRTRTSFTAEQLYRLEMEFQRCQYVVGRERTELARQLNLSETQANSEENNERFKRGIKKQKKKRKKEPANDESRRGDSGGRGWQPL

SEQ ID NO: 2442 - protein, 169 aa, Homo sapiens [sequence omitted]

SEQ ID NO: 2443 - protein, 112 aa, Homo sapiens
MGLDSTLQNLLKVATSVFYNRDQEEAQGKERKHKKKAETLVATLYKTQYPQGTPASCYQCGKLGHFKRDCPGSKKKPPQPCPVYNGDHWKADCPGKHRSLSPEPVSQMVQQD

SEQ ID NO: 2444 - protein, 155 aa, Homo sapiens
MSVFFDLFIYLFIHLLRQSLALSPRLKCSGMILAHCNLHLLGSSDSHASVNRVARTTGIRHHAWPIFVFSVEAGFHHVGQAGLELLTSSDLPALAFQSAGITGVNHCTPPVFFDLLHFFWRQSLSLSPRLECGGTISAHCNLCLPDSSDSHASAS

SEQ ID NO: 2445 - protein, 131 aa, Homo sapiens [sequence omitted]

SEQ ID NO: 2446 - protein, 994 aa, Homo sapiens
MEVALQTEPHLLAGTVNPTVGKRNVTLPIDNGLNLVEWRQRKEQARGQVTVFGRRLRVHNRNLLSLDFDRVTRTEKIYDDHRKFTLRILYDQAGRPSLWSPSSRLNGVNVTYSPGGYIAGIQRGIMSERMEYDQAGRITSRIFADGKTWSYTYLEKSMVLLLHSQRQYIFEFDKNDRLPSVTMPNVARQTLETIRSVGYYRNIYQPPEGNASVIQDFTEDGHLLHTFYLGTGRRVIYKYGKLSKLAETLYDTTKVSFTYDETAGMLKTINLQNEGFTCTIRYRQIGPLIDRQIFRFTEEGMVNARFDYNYDNSFRVTSMQAVINETPLPIDLYRYDDVSGKTEQFGKFGVIYYDINQIITTAVMTHTKHFDAYGRMKEVQYEIFRSLMYWMTVQYDNMGRVVKKELKVGPYANTTRYSYEYDADGQLQTVSINDKPLWRYSYDLNGNLHLLSPGNSARLTPLRYDIRDRITRLGDVQYKMDEDGFLRQRGGDIFEYNSAGLLIKAYNRAGSWSVRYRYDGLGRRVSSKSSHSHHLQFFYADLTNPTKVTHLYNHSSSEITSLYYDLQGHLFAMELSSGDESYIACDNIGTPLAVFSGTGLMIKQILYTAYGEIYMDTNPNFQIIIGYHGGLYDPLTKLVHMGRRDYDVLAGRWTSPDHELWKHLSSSNVMPFNLYMFKNNNPISNSQDIKCFMTDVNSWLLTFGFQLHNVIPGYPKPDMDAMEPSYELIHTQMKTQEWDNSKSILGVQCEVQKQLKAFVTLERFDQLYGSTITSCQQAPKTKKFASSGSVFGKGVKFALKDGRVTTDIISVANEDGRRVAAILNHAHYLENLHFTIDGVDTHYFVKPGPSEGDLAILGLSGGRRTLENGVNVTVSQINTVLNGRTRRYTDIQLQYGALCLNTRYGTTLDEEKARVLELARQRAVRQAWAREQQRLREGEEGLRAWTEGEKQQVLSTGRVQGYDGFFVISVEQYPELSDSANNIHFMRQSEMGRR

SEQ ID NO: 2447 - protein, 132 aa, Homo sapiens
MLLLFLDINDVKRLKPGYLEATVDWFRRYKVPDGKPENEFAFNAEFKDKDFAIDIIKSTHDHWKALVTKKTNGKGISCMNTTLSESPFKCDPDAARAIVDAVCKSFLKKKTSLVAKNYDAKWGEEVLVSTNT

SEQ ID NO: 2448 - protein, 115 aa, Homo sapiens [sequence omitted]

SEQ ID NO: 2449 - protein, 198 aa, Homo sapiens [sequence omitted]

SEQ ID NO: 2450 - protein, 222 aa, Homo sapiens
MSSHLLLTALTDRWVPPATLGVLHQAPGSASLLVRPVLLCYGARAGTGPATPTGMLTPPLAQSLQEHRSLRASGAFFFQIWLASPNPLNPSPDHMQLPGRHCSDSIWPFGTDPPAAAALAVSKADTYPGLESCGLRSCGLPQPLATVPLHNGNDRMNIMFSESRFLLLSKNVFSYFGTKNARKEPYIWIQTHCFSLSLRDLQHINYKQPEKGELPPAVSSDN

SEQ ID NO: 2451 - protein, 922 aa, Homo sapiens
MRCTECGVKCHEKCQDLLNADCLQRAAEKSSKHGAEDRTQNIIMVLKDRMKIRERNKPEIFELIQEIFAVTKTTHTQQMKAVKQSVLDGTSKWSAKISITVVCAQGLQAKDKTGSSDPYVTVQVGKTKKRTKTIYGNLNPVWEENFHFECHNSSDRIKVRVWDEDDDIKSRVKQRFKRESDDFLGQTIIEVRTLSGEMDVWYNLDKRTDKSAVSGAIRLHISVEIKGEEKVAPYHVQYTCLHENLFHFVTDVQNNGVVKIPDAKGDDAWKVYYDETAQEIVDEFAMRYGVESIYQAMTHFACLSSKYMCPGVPAVMSTLLANINAYYAHTTASTNVSASDRFAASNFGKERFVKLLDQLHNSLRIDLSMYRNNFPASSPERLQDLKSTVDLLTSITFFRMKVQELQSPPRASQVVKDCVKACLNSTYEYIFNNCHELYSREYQTDPAKKGEVPPEEQGPSIKNLDFWSKLITLIVSIIEEDKNSYTPCLNQFPQELNVGKISAEVMWNLFAQDMKYAMEEHDKHRLCKSADYMNLHFKVKWLYNEYVTELPSFKDRVPEYPAWFEPFVIQWLDENEEVSRDFLHGALERDKKDGFQQTSEHALFSCSVVDVFSQLNQSFEIIKKLECPDPQIVGHYMRRFAKTISNVLLQYADIISKDFASYCSKEKEKVPCILMNNTQQLRVQLEKMFEAMGGKELDAEASDILKELQVKLNNVLDELSRVFATSFQPHIEECVKQMGDILSQVKGTGNVPASACSSVAQDADNVLQPIMDLLDSNLTLFAKICEKTVLKRVLKELWKLVMNTMEKTIVLPPLTDQTMIGNLLRKHGKGLEKGRVKLPSHSDGTQMIFNAAKELGQLSKLKDHMVREEAKSLTPKQCAVVELALDTIKQYFHAGGVGLKKTFPSLSWVMLLPPCVTFEAVK

SEQ ID NO: 2452 - protein, 380 aa, Homo sapiens
MAHRPTPVPNPGVMSAYAMCVRYDGVEVDDSYCDALTRPEPVHEFCAGRECQPRWETSSWSECSRTCGEGYQFRVVRCWKMLSPGFDSSVYSDLCEAAEAVRPEERKTCRNPACGPQWEMSEWSECTAKCGERSVVTRDIRCSEDEKLCDPNTRPVGEKNCTGPPCDRQWTVSDWGPCSGSCGQGRTIRHVYCKTSDGRVVPESQCQMETKPLAIHPCGDKNCPAHWLAQDWERCNTTCGRGVKKRLVLCMELANGKPQTRSGPECGLAKKPPEESTCFERPCFKWYTSPWSECTKTCGVGVRMRDVKCYQGTDIVRGCDPLVKPVGRQACDLQPCPTEPPDDSCQDQPGTNCALAIKVNLCGHWYYSKACCRSCRPPHS

SEQ ID NO: 2453 - protein, 404 aa, Homo sapiens
MADNLDEFIEEQKARLAEDKAELESDPPYMEMKGKLSAKLSENSKILISMAKENIPPNSQQTRGSLGIDYGLSLPLGEDYERKKHKLKEELRQDYRRYLTQGITQGKRKKNFLSTSETDPSTLGVSLPIGERLSAKERLKLERNKEYNQFLRGKEESSEKFRQVEKSTEPKSQRNKKPIGQVKPDLTSQIQTSCENSEGPRKDVLTPSEAYEELLNQRRLEEDRYRQLDDEIELRNRRIIKKANEEVGISNLKHQRFASKAGIPDRRFHRFNEDRVFDRRYHRPDQDPEVSEEMDERFRYESDFDRRLSRVYTNDRMHRNKRGNMPPMEHDGDVIEQSNIRISSAENKSAPDNETSKSANQDTCSPFAGMLFGGEDRELIQRRKEKYRLELLEQMAEQQRNKRR

SEQ ID NO: 2454 - protein, 193 aa, Homo sapiens
MFRSGQKSPCNPCLPSLSHTLRAIPQQILLALSSNYIQNLTNSHHLHYHHPFPATIITCLDYCHRLLSCLPASSWVPEVYSPCSHLLKCESQHLTALQSLLWLPISLTAKAKARARPWLSDLISNCPPHSAPVTPVCFNYWQRPSLPLPPCLCICSSLCTSRAGFFDDQGFPGSKMIQFLRVFDQNIIWKSNI

SEQ ID NO: 2455 - protein, 120 aa, Homo sapiens
MYTQSLFILLLLYCFLDDLPVIFFFFHSPLFPISALSLPSPGNELGCRRQGAGPGNEIPEQKEQSQISQNIILPHLIWAFYPCGCPFLNSTCAGLRGPCLPAAGWAGQIHLSPPEDCVLR

SEQ ID NO: 2456 - protein, 101 aa, Homo sapiens [sequence omitted]

SEQ ID NO: 2457 - protein, 1033 aa, Homo sapiens
MFTISSDQRMLTNRQLSRHLVGLWTADNATATNLLKRILPPGLLAYLESSDLVPEKDADRMHVRDNVKIAMDQYGKFNKVPEWQRLAGKAAKEVEKFAKEKVDLVLMHWRDRMGIAQKENINQKPVVLRKRRQRIKIEANWDLFYYRFGQDHARSNLIWNFKTREELKDTLESEMRAFNIDRELGSANVISWNHHEFEVKYECLAEEIKIGDYYLRLLLEEDENEESGSIKRSYEFFNELYHRFLLTPKVNMKCLCLQALAIVYGRCHEEIGPFTDTRYIIGMLERCTDKLERDRLILFLNKLILNKKNVKDLMDSNGIRILVDLLTLAHLHVSRATVPLQSNVIEAAPDMKRESEKEWYFGNADKERSGPYGFHEMQELWTKGMLNAKTRCWAQGMDGWRPLQSIPQLKWCLLASGQAVLNETDLATLILNMLITMCGYFPSRDQDNAIIRPLPKVKRLLSDSTCLPHIIQLLLTFDPILVEKVAILLYHIMQDNPQLPRLYLSGVFFFIMMYTGSNVLPVARFLKYTHIKQAFKSEETKGQDIFQRSILGHILPEAMVCYLENYEPEKFSEIFLGEFDTPEAIWSSEMRRLMIEKIAAHLADFTPRLQSNARALYQYCPIPIINYPQLENELFCNIYYLKQLCDTLRFPDWPIKDPVKLLKDTLDAWKKEVEKKPPMMSIDDAYEVLNLPQGQGPHDESKIRKAYFRLAQKYHPDKNPEGRDMFEKVNKAYEFLCTKSAKIVDGPDPENIILILKTQSILFNRHKEDLQPYKYAGYPMLIRTITMETSDDLLFSKESPLLPAATELAFHTVNCSALNAEELRRENGLEVLQEAFSRCVAVLTRSSKPSDMSVQVCGYISKCYSVAAQFEECREKITEMPSIIKDLCRVLYFGKSIPRVAALGVECVSSFAVDFWLQTHLFQAGILWYLLGFLFNYDYTLEESGIQKSEETNQQEVANSLAKLSVHALSRLGGYLAEEQATPENPTIRKSLAGMLTPYVARKLAVASVTEILKMLNSNTESPYLIWNNSTRA

SEQ ID NO: 2458 - protein, 273 aa, Homo sapiens
MPDLSKDSGMNVSEKLSNMGTLNSSMQFRSAESVRSLLSAQQYQEMEGNLHQLSNPIGYRDLQSHGRMHQSFDFDGGMAGSKLPGHEGVRIQPMSERTRRRATSRDDNRRFRPHRSRRSRRSRSDNALHLASEREAISRLKDRPPLRAREDYDQFMRQRSFQESMGHGSRRDLYGQCPRTVSDLALQNAFGDRWGPYFAEYDWCSTCSSSSESDNEGYFLGEPIPQPARLRYVTSDELLHKYSSYGLPKSSTLGGRGQLHSRKRQKSKNCIIS

SEQ ID NO: 2459 - protein, 105 aa, Homo sapiens
MRSWQQRLMNLTELYLEQIEIVRQYSKITAAQNHRRISSPVIPHLLTQESMSVNASHGKGFSRPARPANRRLPSRWASRSPSAPPALRRTTHNYTISLRSEALMV

SEQ ID NO: 2460 - protein, 179 aa, Homo sapiens [sequence omitted]

SEQ ID NO: 2461 - protein, 145 aa, Homo sapiens [sequence omitted]

SEQ ID NO: 2462 - protein, 632 aa, Homo sapiens
MWYALSYYHHYYYSLVMSGPFLIPLHNSLPQGGYNLRALAEGVSASLHTLLGDPCPMLESPGAPCRSAQASVSCALEALEPFWEVLVRSTETVERDNMEEDNVEESEEEGPWEPPVLPILTWPVLQSRTGLVYDQNMMNHCNLWDSHHPEVPQRILRIMCRLEELGLAGRCLTLTPRPATEAELLTCHSAEYVGHLRATEKMKTRELHRESSNFDSIYICPSTFACAQLATGAACRLVEAVLSGEVLNGAAVVRPPGHHAEQDAACGFCFFNSVAVAARHAQTISGHALRILIVDWDVHHGNGTQHMFEDDPNVLYVSLHRYDHGTFFPMGDEGASSQIGRAAGTGFTVNVAWNGPRMGDADYLAAWHRLVLPIAYEFNPELVLVSAGFDAARGDPLGGCQVSPEGYAHLTHLLMGLASGRIILILEGGYNLTSISESMAACTRSLLGDPPPLLTLPRPPLSGALASITETIQVHRRYWRSLRVMKVEDREGPSSSKLVTKKAPQPAKPRLAERMTTREKKVLEAGMGKVTSASFGEESTPGQTNSETAVVALTQDQPSEAATGGATLAQTISEAAIGGAMLGQTTSEEAVGGATRTRPPQRRLWEEPFWTRPPQRMLLGEPRWARLPQRRL

SEQ ID NO: 2463 - protein, 107 aa, Homo sapiens [sequence omitted]

SEQ ID NO: 2464 - protein, 163 aa, Homo sapiens
MAFGEPPSGHSTRHRTLHGLSFHTAMGMAWSLHYQGQGGTLCLVGVSTPSHDKAVLQGLPHFSVNLGVQPSALAGRRGDASCPSSWRSADPTVSPNLGAPGGPNAIDALHGEQLGLFLRTKMGRDPKDVHGLTPALCGPCLAGLPSSHSPQFSCNTAPLKMLS

SEQ ID NO: 2465 - protein, 129 aa, Homo sapiens [sequence omitted]

SEQ ID NO: 2466 - protein, 109 aa, Homo sapiens [sequence omitted]

SEQ ID NO: 2467 - protein, 205 aa, Homo sapiens
MTRMDPYCRLRLGYAVYETPTAHNGAKNPRWNKVIHCTVPPGVDSFYLEIFDERAFSMDDRIAWTHITIPESLRQGKVEDKWYSLSGRQGDDKEGMINLVMSYALLPAAMVMPPQPVVLMPTVYQQGVGYVPITGMPAVCSPGMVPVALPPAAVNAQPRCSEEDLKAIQDMFPNMDQEVIRSVLEAQRGNKDAAINSLLQMGEEP

SEQ ID NO: 2468 - protein, 971 aa, Homo sapiens
MNEIQEYKTSLPLHPPSCLARFLLFRVGLPICRVPASLVGFACKGPLRTLLGENQLRQDSRSCLVASCLTSELVKLSAEEVPEPAECKSEQSPESRTQEPQGTQLAPRAADERETQKHLWGISVQAGNQTSNYTSKYVLSEESKSPTRAKFPRQPSSEGTQVWSGDLMGCLEVSDSSDAPETTQKSSAIDTSKAAEEAMVLDPNYREQALQGLSEFKAATVSHCGPGAEEGEQGPGGAGGRQLEPKAGGEASRGRGALIIVAVEQKGLQASRSNAGPVPETLPRDFPKERPESPLSTGETPCESPTRGKTPAGNECELPAAPIQGAGDGALQRVAQAAELGRVLVPQAASEETPSTEEPPGERLRGESRSSGSGERGPEEAPEGGAAAARGQRPRVPALEPPQPPRGLRKGAQEPGKRPTFSKVTSFRKGRPLATESPGGVPAPTTEGRRWGSSGPEGLPRENPPAAAGRDAPPLHHGDASAWPEFVPQAAGDRTAGPAGAGHTGTSGDLGSRGPSSESCNAKRLKTTEKKLRARLALAHKTFSNFIESIVLEKENTHERSPSSPKGEKEKSRLRQGSWRAFLKSKDAGSPKKPTLVSLPLGPEVLSPAETDSHCEERAEDKEGYVFSDHWAPPLASTPLSSSLVSPEHRRKSEPTIKCTATQEGGRYLPSGIFPEKSWLASPGSPRAQQAGIAHTLPSSSACCLAYENPGTPCRPTSPKPLSPRPSAQRMGLHYPGRGSAISMVSLGSYSYVDSSSGDPERPKIPKGQTSFLLSLQTLNQDEQKEESREGGQGPRGLGTVPWLRDLPGSENHMPWEEPAGEKPSCSHSQKAFHMEPAQKPCFTTDMVTWALLCISAETVRGEAPSQPRGIPHRSPVSVDDLWLEKTQRKKLQKQAHVERRLHIGAVHKDGVKCWRKTIITSPESLNLPRRSHPLSQSAPTGLNHMGWPEHTPGTGELRASLFCYVLWILA

SEQ ID NO: 2469 - protein, 581 aa, Homo sapiens [sequence omitted]

SEQ ID NO: 2470 - protein, 164 aa, Homo sapiens [sequence omitted]

SEQ ID NO: 2471 - protein, 729 aa, Homo sapiens
MSILYHCKKGFYLLGSSALTCMANGLWDRSLPKCLAISCGHPGVPANAVLTGELFTYGAVVHYSCRGSESLIGNDTRVCQEDSHWSGALPHCTGNNPGFCGDPGTPAHGSRLGDDFKTKSLLRFSCEMGHQLRGSPERTCLLNGSWSGLQPVCEAVSCGNPGTPTNGMIVSSDGILFSSSVIYACWEGYKTSGLMTRHCTANGTWTGTAPDCTIISCGDPGTLANGIQFGTDFTFNKTVSYQCNPGYVMEAVTSATIRCTKDGRWNPSKPVCKAVLCPQPPPVQNGTVEGSDFRWGSSISYSCMDGYQLSHSAILSCEGRGVWKGEIPQCLPVFCGDPGIPAEGRLSGKSFTYKSEVFFQCKSPFILVGSSRRVCQADGTWSGIQPTCIDPAHNTCPDPGTPHFGIQNSSRGYEVGSTVFFRCRKGYHIQGSTTRTCLANLTWSGIQTECIPHACRQPETPAHADVRAIDLPTFGYTLVYTCHPGFFLAGGSEHRTCKADMKWTGKSPVCKIPSDVFFVNSLWKGYYEYLGKRQPATLTVDWFNATSSKVNATFSEASPVELKLTGIYKKEEAHLLLKAFQIKGQADIFVSKFENDNWGLDGYVSSGLERGGFTFQGDIHGKDFGKFKLERQDPLNPDQDSSSHYHGTSSGSVAAAILVPFFALILSGFAFYLYKHRTRPKVQYNGYAGHENSNGQASFENPMYDTNLKPTEAKAVRFDTTLNTVCTVV

SEQ ID NO: 2472 - protein, 266 aa, Homo sapiens
MKLPRSRETTSPSPRTLLIFGACCAANTRRRRQRRRRPPRGPLAWRGFIWSTASARLRTTTTTTTITTTTTTTGPSRRSRVTTPLTTTGRSPIWAAFPRAAAATPSPAPTRTTRPTTRILAPVCPAPAILCPQRKRRRRERRRRRKRRRRGAAGPRIPVKSARRRRTRPPSRTPAPAPAKCQCRASDSGAPASASLPACRRRPTSCTIWPPPPLQPNPLLSRMPADFPTSRVVSKRSRRRSGICRAGPPKHLRCTARPAWGVVSLR

SEQ ID NO: 2473 - protein, 174 aa, Homo sapiens [sequence omitted]

SEQ ID NO: 2474 - protein, 130 aa, Homo sapiens
MLPPGPLKCFFLFLFLFFFLRWSFALAAQAGVQWHDLGSPQPPPPGFKRFSCVSLLISWDCRQVPPCPANFVFLVEMGFLHVGQAGLEFLTSGDPPASASQSAGITGVSHRARPTKCLLSHNPDFLLESP

SEQ ID NO: 2475 - protein, 603 aa, Homo sapiens
MRRKEKRLLQAVALVLAALVLLPNVGLWALYRERQPDGTPGGSGAAVAPAAGQGSHSRQKKTFFLGDGQKLKDWHDKEAIRRDAQRVGNGEQGRPYPMTDAERVDQAYRENGFNIYVSDKISLNRSLPDIRHPNCNSKRYLETLPNTSIIIPFHNEGWSSLLRTVHSVLNRSPPELVAEIVLVDDFSDREHLKKPLEDYMALFPSVRILRTKKREGLIRTRMLGASVATGDVITFLDSHCEANVNWLPPLLDRIARNRKTIVCPMIDVIDHDDFRYETQAGDAMRGAFDWEMYYKRIPIPPELQKADPSDPFESPVMAGGLFAVDRKWFWELGGYDPGLEIWGGEQYEISFKVWMCGGRMEDIPCSRVGHIYRKYVPYKVPAGVSLARNLKRVAEVWMDEYAEYIYQRRPEYRHLSAGDVAVQKKLRSSLNCKSFKWFMTKIAWDLPKFYPPVEPPAAAWGEIRNVGTGLCADTKHGALGSPLRLEGCVRGRGEAAWNNMQVFTFTWREDIRPGDPQHTKKFCFDAISHTSPVTLYDCHSMKGNQLWKYRKDKTLYHPVSGSCMDCSESDHRIFMNTCNPSSLTQQWLFEHTNSTVLEKFNRN

SEQ ID NO: 2476 - protein, 139 aa, Homo sapiens [sequence omitted]

SEQ ID NO: 2477 - protein, 160 aa, Homo sapiens [sequence omitted]

SEQ ID NO: 2478 - protein, 186 aa, Homo sapiens
MIALFNKLLDWFKALFWKEEMELTLVGLQYSGKTTFVNVIASGQFNEDMIPTVGFNMRKITKGNVTIKLWDIGGQPRFRSMWERYCRGVSAIVYMVDAADQEKIEASKNELHNLLDKPQLQGIPVLVLGNKRDLPGALDEKELIEKMNLSAIQDREICCYSISCKEKDNIDITLQWLIQHSKSRRS

SEQ ID NO: 2479 - protein, 131 aa, Homo sapiens [sequence omitted]

SEQ ID NO: 2480 - protein, 199 aa, Homo sapiens
MNPRKKVDLKLIIVGAIGVGKTSLPHQYVHKTFYEEYQTTLGASILSKIIILGDTTLKLQIWDTGGQERFRSMVSTFYKGSDGCILAFDVTDLESFEALDIWRGDVLAKIVPMEQSYPMVLLGNKIDLADRKVPQEVAQGWCREKDIPYFEVSAKNDINVVQAFEMLASRALSRYQSILENHLTESIKLSPDQSRSRCC

SEQ ID NO: 2481 - protein, 311 aa, Homo sapiens
MTFLILSIAPVLAVTGMIETAAMTGFANKDKQELKHAGKIATEALENIRTIVSLTREKAFEQMYEEMLQTQHRNTSKKAQIIGSCYAFSHAFIYFAYAAGFRFGAYLIQAGRMTPEGMFIVFTAIAYGAMAIGKTLVLAPEYSKAKSGAAHLFALLEKKPNIDSRSQEGKKPDTCEGNLEFREVSFFYPCRPDVFILRGLSLSIERGKTVAFVGSSGCGKSTSVQLLQRLYDPVQGQVLFDGVDAKELNVQWLRSQIAIVPQEPVLFNCSIAENIAYGDNSRVVPLDEIKEAANAANIHSFIEGLPESLEC

SEQ ID NO: 2482 - protein, 322 aa, Homo sapiens
MASSQGKNELKLADWMATLPESMHSIPLTNLAIPGSHDSFSFYIDEASPVGPEQPETVQNFVSVFGTVAKKLMRKWLATQTMNFTGQLGAGIRYFDLRISTKPRDPDNELYFAHGLFSAKVNEGLEEINAFLTDHHKEVVFLDFNHFYGMQKYHHEKLVQMLKDIYGNKMCPAIFAQEVSLKYLWEKDYQVLVFYHSPVALEVPFLWPGQMMPAPWANTTDPEKLIQFLQASITERRKKGSFFISQVVLTPKASTVVKGVASGLRETITERALPAMMQWVRTQKPGESGINIVTADFVELGDFISTVIKLNYVFDEGEANTW

SEQ ID NO: 2483 - protein, 189 aa, Homo sapiens
MGAQDDLRKVTQSAYAQVVQFGVSEKLGQVSFDFSRHGKTLVEKLYGEASAQLLDDEVRHLVSATYRCALDLLTRCREHVEKVGQRLLEKEVLEKADMVELLGPRPFSAKSTYEEFVEGVGSLEEDTSLPEGLKGWNRGQEEEDVESSLCRGLCVARGGRLHLLLGGVGVTATYLGPWQSSCGISPKTN

SEQ ID NO: 2484 - protein, 120 aa, Homo sapiens
MTCLFIILTVYFEEQKFLIFLKLNFFLSFFLFFETESCNVTQAGVQWRDLVSLQPPPPGIKRFSCLSLPSSWDYRRPPPCPANFLYFSRDGVSLCCPGWSQTPALVIRPRRPPKVLGLQV

SEQ ID NO: 2485 - protein, 123 aa, Homo sapiens
MWRELRGCPGGDLETAQRLSQRRRGKSSEAVPEKTWRAQRMSQRRRGESSEAVPEKTWKELRNSETVPEKTWKQLRGCLQEDVQRVQRLSRRRHGESSKAVHKKMWREFRGCRYCCTWLFFFG

SEQ ID NO: 2486 - protein, 169 aa, Homo sapiens [sequence omitted]

SEQ ID NO: 2487 - protein, 194 aa, Homo sapiens
MGTWGGDGNKRGTGKCPNTPVVPIPCRLPAFPKPSPTYLRTSAEQTLPLLLPHLHGLCLHQPLHLGFTACLGSAHILGGQPALPAVPEPYAGHCQRPLAGTPHHSCHVGPANRGEGARPGWGGTRQPPGSRSLPPAAREGPQVQCSPPEFLPLPWAVLSLQSGLRPEQWALSRWPCPGNKEPLAWALHANKCFF

SEQ ID NO: 2488 - protein, 110 aa, Homo sapiens
MESHSVAQAGVRWQNPGELQHPPPRFKRFSCLSLPSSWDYRCLPPRPAHFCIFSREGGFTMLARLVSNFLPQAIHLPWPPKVLGLQAQSTVTSLLSLFLIEDLEYHLQAG

SEQ ID NO: 2489 - protein, 123 aa, Homo sapiens
MWTSRTTTRRPPWGRFSSVSSASVSSTRKTWRTRSTSCCRSSRRRVAAPFCTPSASTEPSARMEPPLELPVVHTFSFLTFVFTYRCSAGDGSITQINCAYEMGEEMPKRQMKAIKFLLFHFYL

SEQ ID NO: 2490 - protein, 552 aa, Homo sapiens
MNAYLTKQHSCSRGSDGMDAVRSAPTLIRDAHCACGWQRNCQGLGYSSQTMPSSGPGGPASNRTGGSSFNRTLWDSVRKSPHKTSTKGKGTCGEHCTCPHGWFSPAQASPAPIIVNTDTLDTIPYVNGTEIEYEFEEITLERGNSGLGFSIAGGTDNPHIGDDPGIFITKIIPGGAAAEDGRLRVNDCILRVNEVDVSEVSHSKAVEALKEAGSIVRLYVRRRRPILETVVEIKLFKGPKGLGFSIAGGVGNQHIPGDNSIYVTKIIDGGAAQKDGRLQVGDRLLMVNNYSLEEVTHEEAVAILKNTSEVVYLKVGKPTTIYMTDPYGPPDITHSYSPPMENHLLSGNNGTLEYKTSLPPISPGRYSPIPKHMLVDDDYTRPPEPVYSTVNKLCDKPASPRHYSPVECDKSFLLSAPYSHYHLGLLPDSEMTSHSQHSTATRQPSMTLQRAVSLEGEPRKVVLHKGSTGLGFNIVGGEDGEGIFVSFILAGGPADLSGELQRGDQILSVNGIDLRGASHEQAAAALKGAGQTVTIIAQYQPEGQSELKLIMF

SEQ ID NO: 2491 - protein, 146 aa, Homo sapiens
MPYTDVVIHEIQRLVDIVPMGVPHNIIQDTQFRGYLLPKGTDVFPLLGSVLKDPKYFRYPDAFYPQHFLDEQGRFKKNEAFVPFSSGKRICLGEAMARMELFLYFTSTLQNFSLCSLVPLVDIDITPKLSGFGNITPTYELCLVAR

SEQ ID NO: 2492 - protein, 327 aa, Homo sapiens
MALDILAMAPLYQAPAINRIGPKTDPSKRPADPLKPLVLSRTKLTTIEAKRIMSILDEAIYKVELVTLLSYVASNREDMEGMLGEDVMRAVREHEDLCQVLLENVRCLKEKERQLQEQKEAEEEGWLRDRLLSIELQKSSLSPLMQQIKDSTKNVLRLLLSNPQAARLLQMQTQGRSAEAQNFIDSLIELRGFLFEKLLTSPMEARDKAQFLQDISRQNSNNQQIIDTLEKELAERMKNRNAEVLFHSIAEITEEATQIFCWLGFSSMIDFFFKMESRSVVQTRVQWCNLDSLQPLPPRFKRFSHHSLPSSWDYRRMPPRPANFLYF

SEQ ID NO: 2493 - protein, 206 aa, Homo sapiens [sequence omitted]

SEQ ID NO: 2494 - protein, 121 aa, Homo sapiens
MMRSIFLPHRKLICSRRGHLDPRGWEEDEKILVPDAIPTLPPYVFIRTDQACVKVYPGFVLIRNGKTHRHRGDCHEEEVCAHRTLETGGMACHVGPHGEGPSLWGFWGSWKQVLFFLPVDH

SEQ ID NO: 2495 - protein, 204 aa, Homo sapiens
MITISNRDPKPSHQGTSRVTITLTLNLGLLHFSAGCVNVRDPQLQAAVSWRNWTTATGWGSAVGDGTGRGRRPLPRPLSRRWFGTGILHRASLLGAARLPESRRLLPAVPAPAEGCWWWCWGRSALNPCDRKGRYQKRFIAFSWSGQPGPFEGGTAATPTPRFFACLLTAGVSCFVSLFHYFLFFALKKKVLPCSSCPFILIYY

SEQ ID NO: 2496 - protein, 142 aa, Homo sapiens
MFRLLDENKDSLINFKEFVTGMSGMYHGDLTEKLKVLYKLHLPPGESLLPTPQPGSPTCPEVQLQRTGLCETVGPRGGTAASQAGGSHWRRGSGSLSTSQRSESRALAWEGTWRRIPWVTGHCWVQNSHRGGSWTQNPLGGP

SEQ ID NO: 2497 - protein, 177 aa, Homo sapiens
MRTWQQPTFPPVTTRLCPGRGRLSTACPGAPSGGQAQYEPIRGTLPAWEDSVASGGSSREALDQAAEDANLPQAGLAAHGHGGSWPRVSPPGTQACSRPSGMQALGLWGAAWRLASCYKKLWRRLLSVAAGWLWLWKGSPQGPWSATCGPHCRAVVSPHWLPCHDAAEVSAAPARLP

SEQ ID NO: 2498 - protein, 164 aa, Homo sapiens
MVGVVSDDQDFLDSKDTMKMAVVLVTPLGNGDLALKFGYPTPHGGCQKMDTTFTEGAVPGQFSNPAMTLSDIRVAFSDYQHFALLYLEMRKGGLRNQWLQLYGGRAAGRRPRHPRFGSGMSPLCLHQPFLHAEGGTAGSWCLWPRVPAPPCPSLPLFAPPAPSL

SEQ ID NO: 2499 - protein, 447 aa, Homo sapiens [sequence omitted]

SEQ ID NO: 2500 - protein, 206 aa, Homo sapiens [sequence omitted]

SEQ ID NO: 2501 - protein, 134 aa, Homo sapiens
MLEENGECVLMEGKLTHKINTESSLWSLEPGKCVLVNLSKVGEYWWNAILEGEEPIDIDKINKERSMATVDEEEQAVLDRLTFDYHQKLQGKPQSHELKVHEMLKKGWDAEGSPFRGQRFDPAMFNISPGAVQF

SEQ ID NO: 2502 - protein, 195 aa, Homo sapiens
MQRNASVPNLRGSEERLLALKKPALPALSRTTELQDELSHLRSQIAKIVAADAASASLTPDFLSPGSSNVSSPLPCFGSSFHSTTSFVISDITEETEVEVPELPSVPLLCSASPECCKPEHKAACSSSEEDDCVSLSKASSFADMMGILKDFHRMKQSQDLNRSLLKEEDPAVLISEVLRRKFALKEEDISRKGN

SEQ ID NO: 2503 - protein, 121 aa, Homo sapiens [sequence omitted]

SEQ ID NO: 2504 - protein, 421 aa, Homo sapiens [sequence omitted]

SEQ ID NO: 2505 - protein, 131 aa, Homo sapiens
MLLLNQTLATTEKQTALQAAEKFVDELCISYSAKKGRGYARKRQKNLLATLQAYKPQNPKDAPVNCDKCGKPGNVKNDCPGSMRKPARPCPICGGDHWRVDCPQRCRSLGPKPVSQVSNRIDGPQGSCPWL

SEQ ID NO: 2506 - protein, 271 aa, Homo sapiens
MISAHCNLHLPGSSDSPASASQVAGITGRLPTLQTVRYGSKAVTRHRRVMHFQRQKLMAVTEYIPPKPAIHPSCLPSPPSPPQEEIGLIRLLRREIAAVFQDNRMIAVCQNVALSAEDKLLMRHQLRKHKILMKVFPNQVLKPFLEDSKYQNLLPLFVGHNMLLVSEEPKVKEMVRILRTVPFLPLLGGCIDDTILSRQGFINYSKLPSLPLVQGELVGGLTCLTAQTHSLLQHQPLQLTTLLDQYIREQREKDSVMSANGKPDPDTVPDS

SEQ ID NO: 2507 - protein, 1009 aa, Homo sapiens
MEALTLWLLPWICQCVSVRADSIIHIGAIFEENAAKDDRVFQLAVSDLSLNDDILQSEKITYSIKVIEANNPFQAVQEACDLMTQGILALVTSTGCASANALQSLTDAMHIPHLFVQRNPGGSPRTACHLNPSPDGEAYTLASRPPVRLNDVMLRLVTELRWQKFVMFYDSEYDIRGLQSFLDQASRLGLDVSLQKVDKNISHVFTSLFTTMKTEELNRYRDTLRRAILLLSPQGAHSFINEAVETNLASKDSHWVFVNEEISDPEILDLVHSALGRMTVVRQIFPSAKDNQKCTRNNHRISSLLCDPQEGYLQMLQISNLYLYDSVLMLANAFHRKLEDRKWHSMASLNCIRKSTKPWNGGRSMLDTIKKGHITGLTGVMEFREDSSNPYVQFEILGTTYSETFGKDMRKLATWDSEKGLNGSLQERPMGSRLQGLTLKVVTVLEEPFVMVAENILGQPKRYKGFSIDVLDALAKALGFKYEIYQAPDGRYGHQLHNTSWNGMIGELISKRADLAISAITITPERESVVDFSKRYMDYSVGILIKKPEEKISIFSLFAPFDFAVWACIAAAIPVVGVLIFVLNRIQAVRAQSAAQPRPSASATLHSAIWIVYGAFVQQGGESSVNSMAMRIVMGSWWLFTLIVCSSYTANLAAFLTVSRMDNPIRTFQDLSKQVEMSYGTVRDSAVYEYFRAKGTNPLEQDSTFAELWRTISKNGGADNCVSSPSEGIRKAKKGNYAFLWDVAVVEYAALTDDDCSVTVIGNSISSKGYGIALQHGSPYRDLFSQRILELQDTGDLDVLKQKWWPHMGRCDLTSHASAQADGKSLKLHSFAGVFCILAIGLLLACLVAALELWWNSNRCHQETPKEDKEVNLEQVHRRMNSLMDEDIAHKQISPASIELSALEMGGLAPTQTLEPTREYQNTQLSVSTFLPEQSSHGTSRTLSSGPSSNLPLPLSSSATMPSMQCKHRSPNGGLFRQSPVKTPIPMSFQPVPGGVLPEALDTSHGTSI

SEQ ID NO: 2508 - protein, 266 aa, Homo sapiens
MESEGPPESESSEFFSQQEEENEEEEAQEPEETGPKNPLLQPALTGDVEGLQKIFEDPENPHHEQAMQLLLEEDIVGRNLLYAACMAGQSDVIRALAKYGVNLNEKTTRGYTLLHCAAAWGRLETLKALVELDVDIEALNFREERARDVAARYSQTECVEFLDWADARLTLKKYIAKVSLAVTDTEKGSGKLLKEDKNTILSACRAKNEWLETHTEASINELFEQRQQLEDIVTPIFTKMTTPCQVKSAKSVTSHDQKRSQDDTSN

SEQ ID NO: 2509 - protein, 119 aa, Homo sapiens
MSKTEVVISPPPPSTPSPSWMQAVAKVKFPGLMAVSAPSLSPHTPHSASPVAQPIQPLLTALNASLRSRHTVFLVDTTGIHPTHTLTLLSLHPHRLVVHSPHIPQTHALKMWIRSSPGS

SEQ ID NO: 2510 - protein, 315 aa, Homo sapiens [sequence omitted]

SEQ ID NO: 2511 - protein, 289 aa, Homo sapiens
MKTAENIRGTGSDGPRKRGLCVLCGLPAAGKSTFARALAHRLQQEQGWAIGVVAYDDVMPDAFLAGARARPAPSQWKLLRQELLKYLEYFLMAVINGCQMSVPPNRTEAMWEDFITCLKDQDLIFSAAFEAQSCYLLTKTAVSRPLFLVLDDNFYYQSMRYEVYQLARKYSLGFCQLFLDCPLETCLQRNGQRPQALPPETIHLMGRKLEKPNPEKNAWEHNSLTIPSPACASEASLEVTDLLLTALENPVKYAEDNMEQKVNFQCKFNVNEKEQLFVGRSFEPIIKCE

SEQ ID NO: 2512 - protein, 202 aa, Homo sapiens
MKAVCKWRLMLMGHREYKGWPVFPRRQSSHGGLYLCMPQDQSPETMETLGPWPCLGLDKLKQLFLGLWPCSPKTNILYLVAEYSNPGPARGHGSLQGEADSQICWQMTPILTFSMGDACPEEQDPEGRFVARLPSSFHLSRLPFLHKDDDGNKMTGVMPGTKVLILPPTATFLSFTLARNNHEGWVCFGKCLSLYLNDKELN

SEQ ID NO: 2513 - protein, 791 aa, Homo sapiens
MADDKVAILTDDEEEQKRKYVLADPFNGISREPEPPSNETPSSTETSAIPEEEIDWIEKHCVKINNDLLISKVFYFFFYSAYGSLYPLLPVYYKQLGMSPSQSGLLVGIRYFIEFCSAPFWGVVADRFKKGKIVLLFSLLCWVLFNLGIGFVKPATLRCVPKIRPTTHPTNASHQLTILPTNSSFTSFLTISPKMREKRNLLETGLNVSDTVTLPTAPNMNSEPTLQPQTGEITNRMMDLTLNSSTATPVSPGSVTKETTTVIVTTTKSLPSDQVMLVYDQQEVEAIFLVILVVVIIGEFFSASSVTIVDTVTLQYLGKHRDRYGLQRMWGSLGWGLAMLSVGIGIDYTHIEVLIDGKGCKPPEYRNYQIVFIVFGVLMTMALIVATQFRFRYNHFKNDDSKGKEVEIPQVERNNSTESSEETPTTTSHSQAFNFWDLIKLLCSVQYGSVLFVAWFMGFGYGFVFTFLYWHLEDLNGTTTLFGVCSVLSHVSELTAYFFSHKLIELIGHIRVLYIGLACNTARYIYISYLENAWTVLPMEVLQGVTHAAIWAACISYLSAAVPPELRTSAQGILQGLHLGLGRGCGAMIGGVLVNYFGAAATFRGIGMACLVILLLFALIQWLAVPDEEEDKTMLAERIPVPSSPVPIATIDLVQQQTEDVMPRIEPRLPPKKTKHQEEQEDVNKPAWGVSSSPWVTFVYALYQIKEMMQLTRDNRASEIQPLQGTNENRENSPAGRAQPVPCETHSDPSRNQPSPDAAASQTQTSPAHPSVDPCTEESEEQQAQLAAGGH

SEQ ID NO: 2514 - protein, 279 aa, Homo sapiens
MFMGIVAATDFIWLNCYNIDSFCLFQFIRMQFILILILVVEVGDLKELQTLDISTNRLLTLPERLHMCLSLQYLTVDRNRLWYVPRHLCQLPSLNELSMAGNRLAFLPLDLGRSRELQYVYVDNNIHLKGLPSYLYNKVIGCSGCGAPIQVSEVKLLSFSSGQRTVFLPAEVKAIGTEHDHVLPLQELAMRGLYHTYHSLLKDLNFLSPISLPRSLLELLHCPLGHCHRCSEPMFTIVYPKLFPLRETPMAGLHQWKTTVSFVAYCCSTQCLQTFDLLS

SEQ ID NO: 2515 - protein, 175 aa, Homo sapiens
MEERPQRHFRDFQGCPSYHRPRGLGGQNGFREQAQALSVGLLPKTTSRLCAPAQYSEDTPARTQAGQGVAHAADLEVYHNPEWREVNILWGNLQLLEDRSQGIDSPLLPSDLEMHFIRLLRWFSGTEQPFTSGDGQLDKTSFHWISLLLCCAPSALLQLSEVMLPSQILSHKPLP

SEQ ID NO: 2516 - protein, 160 aa, Homo sapiens
MRSFSVPGLFHIISFSSIHVVANDRISFFFMAEWFFIVYMYHISFIHSFVDGHLGCLQILAVVNSAVINMGVQRCLQYTDFHSFRYILGSRIAGSYGSSIVRFIFYLKKHFFETVSLCCLGWSAMAQSWLTVTSASQVQVILLPQPPECLGLQVCATTLG

SEQ ID NO: 2517 - protein, 121 aa, Homo sapiens
MTCDTAALVCLGLEQLGRAPVGAGRLTAWTTTSCVAGAGGPERSSYRSCFPGGLTTGTASCLQLRTLKPGLLWGHFQHPLLSGISSQNIPVPRDCIAPFTWWPSPLCVPLAPCPPGSQDLG

SEQ ID NO: 2518 - protein, 439 aa, Homo sapiens
MLQTTWPQESVTFEDVAVYFTQNQWASLDPAQRALYGEVMLENYANVASLVAFPFPKPALISHLERGEAPWGPDPWDTEILRGISQGGESWIKNEGLVIKQEASEETELHRMPVGGLLRNVSQHFDFKRKALKQTFNLNPNLILRGGMKFYECKECGKIFRYNSKLIRHQMSHTGEKPFKCKECGKAFKSSYDCIVHEKNHIGEGPYECKECGKGLSSNTALTQHQRIHTGEKPYECKECGKAFRRSAAYLQHQRLHTGEKLYKCKECWKAFGCRSLFIVHQRIHTGEKPYQCKECGKAFTQKIASIQHQRVHTGEKPYECKVCGKAFKWYGSFVQHQKLHPVEKKPVKVLGPSLVSPQCSSPAIPPVLLQGSCSASAVAVPSLTFPHAVLIPTSGNFFMLLPTSGIPSSSAQIVRVFQGLTPTVKPSPVILTPSSHSS

SEQ ID NO: 2519 - protein, 178 aa, Homo sapiens
MPGAVGGSRAPADSSERPAARPGGRGNVGDRGELPGRRQPRSFEARRAGKPHGDGWAGAGRSALTRSPAARADGGRLKEGASLPPPAAGGRFRSLPLPLRSGAPRAPSQRARGAPAPCRSRCVIGRRRFLSTSTGLGDTGGRWGLPLPLKTLGLSVGRAFIPHPTLCRPSPGEAPLAL

SEQ ID NO: 2520 - protein, 145 aa, Homo sapiens [sequence omitted]

SEQ ID NO: 2521 - protein, 449 aa, Homo sapiens
MCFLFSTFPRTGKCHVQTIQLCRRLTVEFMHYIIAARALRKVFLSIKGIYYQAEVLGQPIVWITPYAFSHDHPTDVDYRVMATFTEFYTTLLGFVNFRLYQLLNLHYPPKLEGQAQAEAKAGEGTYALDSESCMEKLAALSASLARVVVPATEEEAEVDEFPTDGEMSAQEEDRRKELEAQEKHKKLFEGLKFFLNREVPREALAFIIRSFGGEVSWDKSLCIGATYDVTDSRITHQIVDRPGQQTSVIGRCYVQPQWVFDSVNARLLLPVAEYFSGVQLPPHLSPFVTEKEGDYVPPEKLKLLALQRGEDPGNLNESEEEEEEDDNNEGDGDEEGENEEEEEDAEAGSEKEEEARLAALEEQRMEGKKPRVMAGTLKLEDKQRLAQEEESEAKRLAIMMMKKREKYLYQKIMFGKRRKIREANKLAEKRKAHDEAVRSEKKAKKARPE

SEQ ID NO: 2522 - protein, 146 aa, Homo sapiens [sequence omitted]

SEQ ID NO: 2523 - protein, 216 aa, Homo sapiens
MDIFSKAPFVSKSSMAPSQPEESDVFLRAPFTKKKSMEELTVIQCTSQELPAQTGLLSQTGDVPLPAGRERAVYTSVQAQYSTAGFVQQSNLLSHSVQAADHLDSISPRGSCLESGGHSNDRNKGPQLQKEAVSGPMAGKPFRPQSLSKYSRHYSPEDEPSPEAQPIAAYKIVSQTNKQSIAGSVSITSLSSRTTELPAADPFALAPFPSKSGKKP

SEQ ID NO: 2524 - protein, 1028 aa, Homo sapiens [sequence omitted]

SEQ ID NO: 2525 - protein, 171 aa, Homo sapiens [sequence omitted]

SEQ ID NO: 2526 - protein, 202 aa, Homo sapiens
MLVETGFCRVGQAGLELLSSSDKAAGLDLPKCWDYRHEPPRLAPLLIFNPHPSTVLSCNCEYNSFFEFCDSLQQIVIPERVLGTPRHIFPLPLLFSHFLWSKLKEAPACLLQGSSEHTEIICDLISSSKQFIKKFLSNKPSALHGGDADENDFLQLITRLQKLLFKSLSMYVCVHIHQHTHACPQLSCLHQNQDEELFYCQN

SEQ ID NO: 2527 - protein, 102 aa, Homo sapiens [sequence omitted]

SEQ ID NO: 2528 - protein, 106 aa, Homo sapiens
MASPTLGLVPHMVSETHTVWLEDSTVTSQAQPSASPPLAALGCWPSSDGSRAQSAVSQEKPASSLRGLEEPFSLSLVFDASAPAHCGVRVGLSAQPCPNKSSKALF

SEQ ID NO: 2529 - protein, 386 aa, Homo sapiens
MNEPTENRLGCSRTPEPDIRLRKGHQLDGTRRGDNDSHQGDLEPILEASVLSSHHKKSSEEHEYSDEAPQEDEGFMGMSPLLQAHHAMEKMEEFVCKVWEGRWRVIPHDVLPDWLKDNDFLLHGHRPPMPSFRACFKSIFRIHTETGNIWTHLLGCVFFLCLGIFYMFRPNISFVAPLQEKVVFGLFFLGAILCLSFSWLFHTVYCHSEGVSRLFSKLDYSGIALLIMGSFVPWLYYSFYCNPQPCFIYLIVICVLGIAAIIVSQWDMFATPQYRGVRAGVFLGLGLSGIIPTLHYVISEGFLKAATIGQIGWLMLMASLYITGAALYAARIPERFFPGKCDIWFHSHQLFHIFVVAGAFVHFHGVSNLQEFRFMIGGGCSEEDAL

SEQ ID NO: 2530 - protein, 108 aa, Homo sapiens
MALSPDCEAPLKKEGGLPEGPVLEALLCAETGEKKIELKEEEIIMDCQKQQLLEFPHDLEVEDLEDDIPRRKNRAKGKAYGIGGLRKRQDTASLEDRDKPYVCDSESF

SEQ ID NO: 2531 - protein, 154 aa, Homo sapiens
MLTHLGLSTETEARPAAPTCSVGWHRANAPAAYSPCPWLMSVINLRTFPTEPGQGLQASAQNCRQPPPGIVNKTSVPPPAPLQSNPFHPKQGDWQSPARHGARVGTASVCLCLGVMNKLATKIGVTLGAHQRCPVSWVCESKKRSLAQGVTGSN

SEQ ID NO: 2532 - protein, 593 aa, Homo sapiens [sequence omitted]

SEQ ID NO: 2533 - protein, 115 aa, Homo sapiens [sequence omitted]

SEQ ID NO: 2534 - protein, 406 aa, Homo sapiens
MADSQLFCVAEERSGHCAVVDGNFLYVWGGYVSIEDNEVYLPNDEIWTYDIDSGLWRMHLMEGELPASMSGSCGACINGKLYIFGGYDDKGYSNRLYFVNLRTRDETYIWEKITDFEGQPPTPRDKLSCWVYKDRLIYFGGYGCRRHSELQDCFDVHDASWEEQIFWGWHNDVHIFDTKTQTWFQPEIKGGVPPQPRAAHTCAVLGNKGYIFGGRVLQTRMNDLHYLNLDTWTWSGRITINGESPKHRSWHTLTPIADDKLFLCGGLSADNIPLSDGWIHNVTTNCWKQLTHLPKTRPRLWHTACLGKENEIMVFGGSKDDLLALDTGHCNDLLIFQTQPYSLLRSCLDCIGKNSIMLESQISLLPPKLLQQVLKKITFWAAANHREEQRVQKEETENKYQWISSN

SEQ ID NO: 2535 - protein, 432 aa, Homo sapiens
MLQEDPVLFQLYKDLVVSQVISAEEFWANRLNVNATDSSSTSNHKQDVGISAAFLADVRPQTDGCNGLRYNLTSDIIESIFRTYPAVKMKYAENVPHNMTEKEFWTRFFQSHYFHRDRLNTGSKDLFAECAKIDEKGLKTMVSLGVKNPLLDLTALEDKPLDEGYGISSVPSASNSKSIKENSNAAIIKRFNHHSAMVLAAGLRKQEAQNEQTSEPSNMDGNSGDADCFQPAVKRAKLQESIEYEDLGKNNSVKTIALNLKKSDRYYHGPTPIQSLQYATSQDIINSFQSIRQEMEAYTPKLTQVLSSSAASSTITALSPGGALMQGGTQQAINQMVPNDIQSELKHLYVAVGELLRHFWSCFPVNTPFLEEKVVKMKSNLERFQVTKLCPFQEKIRRQYLSTNLVSHIEEMLQTAYNKLHTWQSRRLMKKT

SEQ ID NO: 2536 - protein, 101 aa, Homo sapiens [sequence omitted]

SEQ ID NO: 2537 - protein, 511 aa, Homo sapiens
MKNYEQALQDASAACQNEPLLIKGHQVKAQALSGLGRSKEVLKEFLYCLALNPECNSVKKEAQKVMCEVLFSATANVHENLTSSIQSRLKAQGHSHMNAQALLEEGDAGSSENSSEKSDMLGNTNSSVLYFILGLHFEEDKKALESILPTAPSAGLKRQFPDDVEDAPDLNAPGKIPKKDLSPQRSPNSETEESQGLSLDVTDFECALCMRLLFEPVTTPCGHTFCLKCLERCLDHAPHCPLCKDKLSELLASRNFNITVLAEELIFRYLPDELSDRKRIYDEEMSELSNLTRDVPIFVCAMAFPTVPCPLHVFEPRYRLMIRRCMETGTKRFGMCLSAEHAGLSEYGCMLEIKDVRTFPDGSSVVDAIGISRFRVLSHRHRDGYNTADIEYLEDEKVEGPEYEELAALHDSVHQQSVSWFASLQDRMKEQILSHFGVMPDREPEPQSNPSGPAWSWWILAVLPLERKAQLAILGMTSLKERLLAIRRILVIITRKMNSRQELANARERNN

SEQ ID NO: 2538 - protein, 193 aa, Homo sapiens
MGRGLPDEEQEKLLRICSIYTQSGENSLVQEGSEASPIGKSPYTLDSLYWSVKPASSSFGSEAKAQQQEEQGSVNDVKEEEKEEKEVLPDQVEEEEENDDQEEEEEDEDDEDDEEEDRMEVGPFSTGQESPTAENARLLAQKRGALQGSAWQVSSEDVRWDTFPLGRMPGQTEDPAELMLENYDTMYLWTSLC

SEQ ID NO: 2539 - protein, 168 aa, Homo sapiens
MGWRFPSPSPRQASPVAPLLAAPTAVRSCSHCSGQREAISSHPLQLETPELGVCLPWHWEGWRQVRKITPSLPQPPGSQVPLEVTFHVRATLPHFRGGETKARRAREEGKLPSLGNAPAPRRRSVAWPAAEGSCAAPESSPPASEASLPAPESSLLVAGSGDLCADSF

SEQ ID NO: 2540 - protein, 597 aa, Homo sapiens
MALNSPQPGPVESELGKQLLKTGWEGSPLPRSPTQDAAGVGPPASQGRGPAGEPMGPEAGSKAELPPTVSRPPLLRGLSWDSGPEEPGPRLQKVLAKLPLAEEEKRFAGKAGGKLAKAPGLKDFQIQVQPVRMQKLTKLREEHILMRNQNLVGLKLPDLSEAAEQEKGLPSELSPAIEEEESKSGLDVMPNISDVLLRKLRVHRSLPGSAPPLTEKEVENVFVQLSLAFRNDSYTLESRINQAERERNLTEENTEKELENFKASITSSASLWHHCEHRETYQKLLEDIAVLHRLAARLSSRAEVVGAVRQEKRMSKATEVMMQYVENLKRTYEKDHAELMEFKKLANQNSSRSCGPSEDGVPRTARSMSLTLGKNMPRRRVSVAVVPKFNALNLPGQTPSSSSIPSLPALSESPNGKGSLPVTSALPALLENGKTNGDPDCEASAPALTLSCLEELSQETKARMEEEAYSKGFQEGLKKTKELQDLKEEEEEQKSESPEEPEEVEETEEEEKGPRSSKLEELVHFLQVMYPKLCQHWQVIWMMAAVMLVLTVVLGLYNSYNSCAEQADGPLGRSTCSAAQRDSWWSSGLQHEQPTEQ

SEQ ID NO: 2541 - protein, 163 aa, Homo sapiens
MHSLPRSGSIRRTHSDTQATGWPPPQRIGDSPGPSPAFLSCPPSLCGGAAQTGDPVALPHGPEKWVWGGGLSPRNPHSWGIKAHGLRPPWAPRLERCMVPESEWAPWQPQLPCEPKWLGSRKSKPHRESGLRGGGPSRCAKRGTHSCGPRESGGPDTCHLPCH

SEQ ID NO: 2542 - protein, 108 aa, Homo sapiens
MVAQLEQGSILLQQLGDLHLRLASTDVSLVVEAELGQRVVLEEGPEDGQDAFACDVVGVQVEAGDGLVGLEHDGNGKGHVVIGSRVGQGEQLNHSVELQSLSKPDQDL

SEQ ID NO: 2543 - protein, 725 aa, Homo sapiens
MDTEFGASSFFHSPASCHESHSSLSPESSAPQHSSPSRSALKLLTSVEVDNIEPSAFHRQGLPKAPGWTEKNSHHSWEPLDAPEGKLQGSRCDNSSCSKLPPQEGRGIAQEQLFQEKKDPANPSPVMPGIATSERGDEHSLGCSPSNSSAQPSLPLYRTCHPIMPVASSFVLHCPDPVQKTNQCLQGQSLKTSLTLKVDRGSEETYRPEFPSTKGLVRSLAEQFQRMQGVSMRDSTGFKDRSLSGSLRKNSSPSDSKPPFSQGQEKGHWPWAKQQSSLEGGDRPLSWEESTEHSSLALNSGLPNGETSSGGQPRLAEPDIYQEKLSQVRDVRSKDLGSSTDLGTSLPLDSWVNITRFCDSQLKHGAPRPGMKSSPHDSHTCVTYPERNHILLHPHWNQDTEQETSELESLYQASLQASQAGCSGWGQQDTAWHPLSQTGSADGMGRRLHSAHDPGLSKTSTAEMEHGLHEARTVRTSQDSSNVRKPLETGHRCSSSSSLPVIHDPSVFLLGPQLYLPQPQFLSPDVLMPTMAGEPNRLPGTSRSVQQFLAMCDRGETSQGAKYTGRTLNYQSLPHRSRTDNSWAPWSETNQHIGTRFLTTPGCNPQLTYTATLPERSKGLQVPHTQSWSDLFHSPSHPPIVHPVYPPSSSLHVPLRSAWNSDPVPGSRTPGPRRVDMPPDDDWRQSSYASHSGHRRTVGEGFLFVLSDAPRREQIRARVLQHSQW

SEQ ID NO: 2544 - protein, 465 aa, Homo sapiens [sequence omitted]

SEQ ID NO: 2545 - protein, 654 aa, Homo sapiens [sequence omitted]

SEQ ID NO: 2546 - protein, 152 aa, Homo sapiens [sequence omitted]

SEQ ID NO: 2547 - protein, 904 aa, Homo sapiens
MEWGSESAAVRRHRVGVERREGAAAAPPPEREARAQEPLVDGCSGGGRTRKRSPGGSGGASRGAGTGLSEVRAALGLALYLIALRTLVQLSLQQLVLRGAAGHRGEFDALQARDYLEHITSIGPRTTGSPENEILTVHYLLEQIKLIEVQSNSLHKISVDVQRPTGSFSIDFLGGFTSYYDNITNVVVKLEPRDGAQHAVLANCHFDSVANSPGASDDAVSCSVMLEVLRVLSTSSEALHHAVIFLFNGAEENVLQASHGFITQHPWASLIRAFINLEAAGVGGKELVFQTGPENPWLVQAYVSAAKHPFASVVAQEVFQSGIIPSDTDFRIYRDFGNIPGIDLAFIENGYIYHTKYDTADRILTDSIQRAGDNILAVLKHLATSDMLAAASKYRHGNMVFFDVLGLFVIAYPSRIGSIINYMVVMGVVLYLGKKFLQPKHKTGNYKKDFLCGLGITLISWFTSLVTVLIIAVFISLIGQSLSWYNHFYVSVCLYGTATVAKIILIHTLAKRFYYMNASAQYLGEVFFDISLFVHCCFLVTLTYQGLCSAFISAVWVAFPLLTKLCVHKDFKQHGAQGKFIAFYLLGMFIPYLYALYLIWAVFEMFTPILGRSGSEIPPDVVLASILAGCTMILSSYFINFIYLAKSTKKTMLTLTLVCAITFLLVCSGTFFPYSSNPANPKPKRVFLQHMTRTFHDLEGNAVKRDSGIWINGFDYTGISHITPHIPEINDSIRAHCEENAPLCGFPWYLPVHFLIRKNWYLPAPEVSPRNPPHFRLISKEQTPWDSIKLTFEATGPSHMSFYVRAHKGSTLSQWSLGNGTPVTSKGGDYFVFYSHGLQASAWQFWIEVQVSEEHPEGMVTVAIAAHYLSGEDKRSPQLDALKEKFPDWTFPSAWVCTYDLFVF

SEQ ID NO: 2548 - protein, 262 aa, Homo sapiens
MLAQGYPAYTTSCAWLGYSDDTLKQLCAQALKDGWTRFKVKVGADLQDDMRRCQIIRDMIGPEKTLMMDANQRWDVPEAVEWMSKLAKFKPLWIEEPTSPDDILGHATISKALVPLGIGIATGEQCHNRVIFKQLLQAKALQFLQIDSCRLGSVNENLSVLLMAKKFEIPVCPHAGGVGLCELVQHLIIFDYISVSASLENRVCEYVDHLHEHFKYPVMIQRASYMPPKDPGYSTEMKEESVKKHQYPDGEVWKKLLPAQEN

SEQ ID NO: 2549 - protein, 198 aa, Homo sapiens [sequence omitted]

SEQ ID NO: 2550 - protein, 441 aa, Homo sapiens
MGSQARPHSTLQGFGYSKEHGRTGSAGEAFLSTIQKAAEVVASAMRPGPESPSTRRLLPRGDTYQPAMMPSASHGPPTLGNLLPGAIPGPRAVRHQPGQAGGGWDELDSGPSSQNSSQNSDLSRVSDSGSHSGSDSHSGASREPGDLAERVEVVALSDCQQELSLVRTVTRGPRAFLSREEAQHFIKACGLLNCEAVLQLLTCHLRGTSECTQLRALCAIASLGSSDLLPQEHILLRTRPWLQELSMGSPGPVTNKATKILRHFEASCGQLSPARGTSAEPGPTAALPGPSDLLTDAVPLPGSQVFLQPLSSTPVSSRSPAPSSGMPSSPVPTPPPDASPIPAPGDPSEAEARLAESRRWRPERIPGGTDSPKRGPSSCAWSRDSLFAGMELVACPRLVGAGAAAGESCPDAPRAPQTSSQRTAAKEPPGSEPSAFAFLNA

SEQ ID NO: 2551 - protein, 131 aa, Homo sapiens [sequence omitted]

SEQ ID NO: 2552 - protein, 233 aa, Homo sapiens
MSSQGQSLVPMRSSQRKRPAREVSAGGHVHVLWCPQRLPSCGIITETTPCSMTFLPVVSLQRQSHLDDVISNSKASFGIIAMGKIFSPCVFAAEKMPLSYDVIITDKAIFLGHVAGENASPIVSSLDIRSPFHNIITGTLPPSCDAITREGALPYDVIRGTVPLPVMSSPEMTTHSGTSPGGGPFCDVAQMLCALRWHKEMPPLLPPCCRRQGRPRVQDHPREDAREQRGALS

SEQ ID NO: 2553 - protein, 213 aa, Homo sapiens
MTQGSETLPSPLPVPSSACPLPNRLPTPYFACVLPIPQVCQKTAEISLLKQQLREAQAELAQKLAEIFSLKTQLRGSRAQAQAQDAELVRLREAVRSLQEQAPREEAPGSCETDDCKSRGLLGEAGGSEARDSAEQLRAELLQERLRGQEQALRFEQERRTWQEEKERVLRYQREIQGGYMDMYRRNQALEQELRALREPPTPWSPRLESSKI

SEQ ID NO: 2554 - protein, 178 aa, Homo sapiens [sequence omitted]

SEQ ID NO: 2555 - protein, 905 aa, Homo sapiens
MTSATSPIILKWDPKSLEIRTLTVERLLEPLVTQVTTLVNTSNKGPSGKKKGRSKKAHVLAASVEQATQNFLEKGEQIAKESQDLKEELVAAVEDVRKQGETMRIASSEFADDPCSSVKRGTMVRAARALLSAVTRLLILADMADVMRLLSHLKIVEEALEAVKNATNEQDLANRFKEFGKEMVKLNYVAARRQQELKDPHCRDEMAAARGALKKNATMLYTASQAFLRHPDVAATRANRDYVFKQVQEAIAGISNAAQATSPTDEAKGHTGIGELAAALNEFDNKIILDPMTFSEARFRPSLEERLESIISGAALMADSSCTRDDRRERIVAECNAVRQALQDLLSEYMNNTGRKEKGDPLNIAIDKMTKKTRDLRRQLRKAVMDHISDSFLETNVPLLVLIEAAKSGNEKEVKEYAQVFREHANKLVEVANLACSISNNEEGVKLVRMAATQIDSLCPQVINAALTLAARPQSKVAQDNMDVFKDQWEKQVRVLTEAVDDITSVDDFLSVSENHILEDVNKCVIALQEGDVDTLDRTAGAIRGRAARVIHIINAEMENYEAGVYTEKVLEATKLLSETVMPRFAEQVEVAIEALSANVPQPFEENEFIDASRLVYDGVRDIRKAVLMIRTPEELEDDSDFEQEDYDVRSRTSVQTEDDQLIAGQSARAIMAQLPQEEKAKIAEQVEIFHQEKSKLDAEVAKWDDSGNDIIVLAKQMCMIMMEMTDFTRGKGPLKNTSDVINAAKKIAEAGSRMDKLARAVADQCPDSACKQDLLAYLQRIALYCHQLNICSKVKAEVQNLGGELIVSGLDSATSLIQAAKNLMNAVVLTVKASYVASTKYQKVYGTAAVNSPVVSWKMKAPEKKPLVKREKPEEFQTRVRRGSQKKHISPVQALSEFKAMDSF

SEQ ID NO: 2556 - protein, 495 aa, Homo sapiens [sequence omitted]

SEQ ID NO: 2557 - protein, 620 aa, Homo sapiens
MFETSLPRKMAEILVATVAFLLPSAEYSSVETDKKFIVSLLLCLLDWCMALPVSVLLHPVSTAVLEEQHSARAPLLDYIYRVLHCCVCGSSTYTQQSHYILTLADLSSTDYDPFLPLANVKSSEPVQYHSSAELGNLLTVEEEKKRRSLELIPLTARMVMAHLVNHLGHYPLSGGPAILHSLVSENHDNAHVEGSELSFEVFRSPNLQLFVFNDSTLISYLQTPTEGPVGGSPVGSLSDVRVIVRDISGKYSWDGKVLYGPLEGCLAPNGRNPSFLISSWHRDTFGPQKDSSQVEEGDDVLDKLLENIGHTSPECLLPSQLNLNEPSLTPCGMNYDQEKEIIEVILRQNAQEDEYIQSHNFDSAMKVTSQGQPSPVEPRGPFYFCRLLLDDLGMNSWDRRKNFHLLKKNSKLLRELKNLDSRQCRETHKIAVFYIAEGQEDKCSILSNERGSQAYEDFVAGLGWEVDLSTHCGFMGGLQRNGSTGQTAPYYATSTVEVIFHVSTRMPSDSDDSLTKKLRHLGNDEVHIVWSEHSRDYRRGIIPTAFGDVSIIIYPMKNHMFFIAITKKPEVPFFGPLFDGAIVSGKLLPSLVCATCINASRAVKCLIPLYQSLYLFALNV

SEQ ID NO: 2558 - protein, 214 aa, Homo sapiens [sequence omitted]

SEQ ID NO: 2559 - protein, 108 aa, Homo sapiens [sequence omitted]

SEQ ID NO: 2560 - protein, 129 aa, Homo sapiens [sequence omitted]

SEQ ID NO: 2561 - protein, 130 aa, Homo sapiens
MQELKGYQIPKGWSVMYSIRDTHETAAVYRSPPEGFDPERFGAAREDSRGASSRFHYIPFGGGARSCLGQELAQAVLQLLAVELVRTARWELATPAFPAMQTVPIVHPVDGLRLFFHPLTPSVAGNGLCL

SEQ ID NO: 2562 - protein, 328 aa, Homo sapiens
MPQATSPPLWPLSLHGGKGILWARHSHPPGPPSHHIQDSGRCSLPLPQSPGVTPLPARLSGATPLSPIRLLSSFVPRGPRVIPLTNQARRTLHASLGGCWGRTSDAADTASLKAWQGGPEFLKTPLGGSFLVYESFLYRREKAAGEKVYWTCRDQARMGCRSRAITQGRRVMVMRRHCHPPDLGGLEALRQREHFPNLAQWDSPDPLRPLEFLRTSLGGRFLVHESFLYRKEKAAGEKVYWMCRDQARLGCRSRAITQGHRIMVMRSHCHQPDLAGLEALRQRERLPTTAQQEDPEKIQVQLCFKTCSPESQQIYGDIKDVRLDGESQ

SEQ ID NO: 2563 - protein, 191 aa, Homo sapiens
MSPPGFGAAPRVPVHTLFDPGSAGLGAGETPTSPAPSDWSRGWLGKTAASILPFQLHPPTLPRAQNRDKLVACASLSPTHPTKTCDLATAPPIQPYPLGASCRQAGAGLVGASCSCTEAPLPQFCIGVEMCTAAPAVARKQLCRGRMWWAQAQGTGAASQPSLHLPCSSRAPGTWSGWCQMTRTSWTPRTP

SEQ ID NO: 2564 - protein, 983 aa, Homo sapiens [sequence omitted]

SEQ ID NO: 2565 - protein, 907 aa, Homo sapiens [sequence omitted]

SEQ ID NO: 2566 - protein, 726 aa, Homo sapiens [sequence omitted]

SEQ ID NO: 2567 - protein, 763 aa, Homo sapiens
MDHLNEATQGKEHSEMSNNVSDPKGPPAKIARLEQNGSPLGRGRLGSTGAKMQGVPLKHSGHLMKTNLRKGTMLPVFCVVEHYENAIEYDCKEEHAEFVLVRKDMLFNQLIEMALLSLGYSHSSAAQAKGLIQVGKWNPVPLSYVTDAPDATVADMLQDVYHVVTLKIQLHSCPKLEDLPPEQWSHTTVRNALKDLLKDMNQSSLAKECPLSQSMISSIVNSTYYANVSAAKCQEFGRWYKHFKKTKDMMVEMDSLSELSQQGANHVNFGQQPVPGNTAEQPPSPAQLSHGSQPSVRTPLPNLHPGLVSTPISPQLVNQQLVMAQLLNQQYAVNRLLAQQSLNQQYLNHPPPVSRSMNKPLEQQVSTNTEVSSEIYQWVRDELKRAGISQAVFARVAFNRTQGLLSEILRKEEDPKTASQSLLVNLRAMQNFLQLPEAERDRIYQDERERSLNAASAMGPAPLISTPPSRPPQVKTATIATERNGKPENNTMNINASIYDEIQQEMKRAKVSQALFAKVAATKSQGWLCELLRWKEDPSPENRTLWENLSMIRRFLSLPQPERDAIYEQESNAVHHHGDRPPHIIHVPAEQIQQQQQQQQQQQQQQQAPPPPQPQQQPQTGPRLPPRQPTVASPAESDEENRQKTRPRTKISVEALGILQSFIQDVGLYPDEEAIQTLSAQLDLPKYTIIKFFQNQRYYLKHHGKLKDNSGLEVDVAEYKEEELLKDLEESVQDKNTNTLFSVKLEEELSVEGNTDINTDLKD

SEQ ID NO: 2568 - protein, 129 aa, Homo sapiens [sequence omitted]

SEQ ID NO: 2569 - protein, 138 aa, Homo sapiens
MESCMEIPLLRGLVVIGRGYLRGCQERVQQSKRRGQGVDNYDELWLYLCTLVSCSEPLKRSCSFSRNAGASKTHTGTGILLDPMSLAPPLTVALPWVITTNLHDLPRLCQKDVKGTHQGKMPTCRRRSTVSDKVVLES

SEQ ID NO: 2570 - protein, 537 aa, Homo sapiens
MLADKHAKEIEEESETTVEADLTDKQKHQLKHRELFLSRQYESLPATHIRGKCSVALLNETESVLSYLDKEDTFFYSLVYDPSLKTLLADKGEIRVGPRYQADIPEMLLEGESDEREQSKLEVKVWDPNSPLTDRQIDQFLVVARAVGTFARALDCSSSVRQPSLHMSAAAASRDITLFHAMDTLYRHSYDLSSAISVLVPLGGPVLCRDEMEEWSASEASLFEEALEKYGKDFNDIRQDFLPWKSLTSIIEYYYMWKTTDRYVQQKRLKAAEAESKLKQVYIPTYKPNPNQISTSNGKPGAVNGAVGTTFQPQNPLLGRACESCYATQSHQWYSWGPPNMQCRLCAICWLYWKKYGGLKMPTQSEEEKLSPSPTTEDPRVRSHVSRQAMQGMPVRNTGSPKSAVKTRQAFFLHTTYFTKFARQVCKNTLRLRQAARRPFVAINYAAIRAEYADRHAELSGSPLKSKSTRKPLACIIGYLEIHPAKKPNVIRSTPSLQTPTTKRMLTTPNHTSLSILGKRNYSHHNGLDELTCCVSD

SEQ ID NO: 2571 - protein, 1314 aa, Homo sapiens
MEKHNALRCLPGRNRKESTSEQMPSFPEMVYYIQEKASHRMKTPVKYMTGTTVLPFNPAAFGEIVLYLRMCLAHSAGVVPTSQSLADMQDHAPAIGRYIRTLMSSGQMAPSSSNKSGETNPVQIYIGLLQQLLAGVGGLPVMYCLLEAVSVYPEKLATKFVDKTEWIKSLMNNSKEEMRELAALFYSVVVSTVSGNELKSMIEQLIKTTKDNHSPEIQHGSLLALGFTVGRYLAKKKMRMSEQQDLERNADTLPDQEELIQSATETIGSFLDSTSPLLAIAACTALGEIGRNGPLPIPSEGSGFTKLHLVESLLSRIPSSKETNKMKERAIQTLGYFPVGDGDFPHQKLLLQGLMDSVEAKQIELQFTIGEAITSAAIGTSSVAARDAWQMTEEEYTPPAGAKVNDVVPWVLDVILNKHIISPNPHVRQAACIWLLSLVRKLSTHKEVKSHLKEIQSAFVSVLSENDELSQDVASKGLGLVYELGNEQDQQELVSTLVETLMTGKRVKHEVSGETVVFQGGALGKTPDGQGLSTYKELCSLASDLSQPDLVYKFMNLANHHAMWNSRKGAAFGFNVIATRAGEQLAPFLPQLVPRLYRYQFDPNLGIRQAMTSIWNALVTDKSMVDKYLKEILQDLVKNLTSNMWRVRESSCLALNDLLRGRPLDDIIDKLPEIWETLFRVQDDIKESVRKAAELALKTLSKVCVKMCDPAKGAAGQRTIAALLPCLLDKGMMSTVTEVRALSINTLVKISKSAGAMLKPHAPKLIPALLESLSVLEPQVLNYLSLRATEQEKAAMDSARLSAAKSSPMMETINMCLQYLDVSVLGELVPRLCELIRSGVGLGTKGGCASVIVSLTTQCPQDLTPYSGKLMSALLSGLTDRNSVIQKSCAFAMGHLVRTSRDSSTEKLLQKLNGWYMEKEEPIYKTSCALTIHAIGRYSPDVLKNHAKEVLPLAFLGMHEIADEEKSEKEECNLWTEVWQENVPGSFGGIRLYLQELITITQKALQSQSWKMKAQGAIAMASIAKQTSSLVPPYLGMILTALLQGLAGRTWAGKEELLKAIACVVTACSAELEKSVPNQPSTNEILQAVLKECSKENVKYKIVAISCAADILKATKEDRFQEFSNIVIPLIKKNSLESSGVRTTKNEEENEKEKELQLEYLLGAFESLGKAWPRNAETQRCYRQELCKLMCERLKLSTWKVQLGVLQSMNAFFQGLMLLEEEHADPEALAEILLETCKSITYSLENKTYSSVRTEALSVIELLLKKLEESKQWECLTSECRVLLIESLATMEPDSRPELQEKAALLKKTLENLE

SEQ ID NO: 2572 - protein, 596 aa, Homo sapiens
MDLSTGQEEEAENFAPILAFLDHEGYADHFKSLYDFSFSFLTSSFYSFSEEDEFVAYLEASRKWAKKSHMTWAHARLCFLLGRLSIRKVKLSQARVYFEEAIHILNGAFEDLSLVATLYINLAAIYLKQRLRHKGSALLEKAGALLACLPDRESSAKHELDVVAYVLRQGIVVGSSPLEARACFLAIRLLLSLGRHEEVLPFAERLQLLSGHPPASEAVASVLSFLYDKKYLPHLAVASVQQHGIQSAQGMSLPIWQVHLVLQNTTKLLGFPSPGWGEVSALACPMLRQALAACEELADRSTQRALCLILSKVYLEHRSPDGAIHYLSQALVLGQLLGEQESFESSLCLAWAYLLASQAKKALDVLEPLLCSLKETESLTQRGVIYNLLGLALQGEGRVNRAAKSYLRALNRAQEVGDVHNQAVAMANLGHLSLKSWAQHPARNYLLQAVRLYCELQASKETDMELVQVFLWLAQVLVSGHQLTHGLLCYEMALLFGLRHRHLKSKYVPCCWEAIERSVGSSFIHFLSQVISFMSLLCVQVSFRPPNPSAISTALCPQTLRHASPTMSTGWPWLSNSGTGRWKEGCWSPWGSFIGT

SEQ ID NO: 2573 - protein, 479 aa, Homo sapiens [sequence omitted]

SEQ ID NO: 2574 - protein, 202 aa, Homo sapiens [sequence omitted]

SEQ ID NO: 2575 - protein, 147 aa, Homo sapiens
MQGPQLMYLWKEAKPEDLMDSKLRCVFELPAENDKPHDVEINKIISTTASKTETPIVSKSLSSSLDDTEVKKVMEECKRLQGEVQRLREENKQFKEEDGLRMRKTVQSNSPISALAPTGKEEGLSTRLLALVVLFFIVGVIIGKIAL

SEQ ID NO: 2576 - protein, 249 aa, Homo sapiens [sequence omitted]

SEQ ID NO: 2577 - protein, 116 aa, Homo sapiens [sequence omitted]

SEQ ID NO: 2578 - protein, 1007 aa, Homo sapiens
MLVPLLLQYLETLSGLVDSNLNCGPVLTWMELDNHGRRLLLSEEASLNIPAVAAAHVIKRYTAQAPDELSFEVGDIVSVIDMPPTEDRSWWRGKRGFQVGFFPSECVELFTERPGPGLKADADGPPCGIPAPQGISSLTSAVPRPRGKLAGLLRTFMRSRPSRQRLRQRGILRQRVFGCDLGEHLSNSGQDVPQVLRCCSEFIEAHGVVDGIYRLSGVSSNIQRLRHEFDSERIPELSGPAFLQDIHSVSSLCKLYFRELPNPLLTYQLYGKFSEAMSVPGEEERLVRVHDVIQQLPPPHYRTLEYLLRHLARMARHSANTSMHARNLAIVWAPNLLRSMELESVGMGGAAAFREVRVQSVVVEFLLTHVDVLFSDTFTSAGLDPAGRCLLPRPKSLAGSCPSTRLLTLEEAQARTQGRLGTPTEPTTPKAPASPAERRKGERGEKQRKPGGSSWKTFFALGRGPSVPRKKPLPWLGGTRAPPQPSGSRPDTVTLRSAKSEESLSSQASGAGLQRLHRLRRPHSSSDAFPVGPAPAGSCESLSSSSSSESSSSESSSSSSESSAAGLGALSGSPSHRTSAWLDDGDELDFSPPRCLEGLRGLDFDPLTFRCSSPTPGDPAPPASPAPPAPASAFPPRVTPQAISPRGPTSPASPAALDISEPLAVSVPPAVLELLGAGGAPASATPTPALSPGRSLRPHLIPLLLRGAEAPLTDACQQEMCSKLRGAQGPLGPDMESPLPPPPLSLLRPGGAPPPPPKNPARLMALALAERAQQVAEQQSQQECGGTPPASQSPFHRSLSLEVGGEPLGTSGSGPPPNSLAHPGAWVPGPPPYLPRQQSDGSLLRSQRPMGTSRRGLRGPAQVPTPGFFSPAPRECLPPFLGVPKPGLYPLGPPSFQPSSPAPVWRSSLGPPAPLDRGENLYYEIGASEGSPYSGPTRSWSPFRSMPPDRLNASYGMLGQSPPLHRSPDFLLSYPPAPSCFPPDHLGYSPPSTLLGALHRLSPSTST

SEQ ID NO: 2579 - protein, 792 aa, Homo sapiens [sequence omitted]

SEQ ID NO: 2580 - protein, 282 aa, Homo sapiens
MEVKNLPQTNFRRLPFDHCSLSLQPFVYPVCTPDGIVFDLLNIVPWLKKYGTNPSNGEKLDGRSLIKLNFSKNSEGKYHCPVLFTVFTNNTHIVAVRTTGNVYAYEAVEQLNIKAKNFRDLLTDEPFSRQDIITLQDPTNLDKFNVSNFYHVKNNMKIIDPDEEKAKQDPSYYLKNTNAETRETLQELYKEFKGDEILAATMKAPEKKKVDKLNADLAMLSRLVLNSWLQVRASCLGLRKCWNYRPTIPQGRSALPSPPPRWSRRPHMKQLPSTRMCCATSL

SEQ ID NO: 2581 - protein, 135 aa, Homo sapiens
MLENHQMAEANWQPVSLVSLRGASLPCVIVLGFRRVNLECLGVPTSSSALSFTCVWYSVIITAGMAYIFLIQLINISYNVTEREVQQALRQKTGRRLLCGLIVDTGQYNRGFLRNWHQFSTLGTRAFHHPAEDIV

SEQ ID NO: 2582 - protein, 129 aa, Homo sapiens [sequence omitted]

SEQ ID NO: 2583 - protein, 1188 aa, Homo sapiens [sequence omitted]

SEQ ID NO: 2584 - protein, 1287 aa, Homo sapiens [sequence omitted]

SEQ ID NO: 2585 - protein, 240 aa, Homo sapiens
MGEDSPVAMFSWYLDNTPTEQAEPLLDACRLRGFWPRSLTLLQSNTSTLLLNSSFLQSRGEVIRIRATGSCLHCGPEPALPSVYLPLGEENNDFVLTVVISATNRAGDTQQTQAMAKVALGDTCVEDVAFQAAVSEKIPTALQGEGGPEQLLQLAKAVSSMLNQEHESQGSGQSLSIDVRQKVPVGSWGAPFIPFLWGPRVCVRPFGLWIKVHGSGEKPVVSPKRLTPPPSLVFWVSDIK

SEQ ID NO: 2586 - protein, 767 aa, Homo sapiens
MDTEFGASSFFHSPASCHESHSSLSPESSAPQHSSPSRSALKLLTSVEVDNIEPSAFHRQGLPKAPGWTEKNSHHSWEPLDAPEGKLQGSRCDNSSCSKLPPQEGRGIAQEQLFQEKKDPANPSPVMPGIATSERGDEHSLGCSPSNSSAQPSLPLYRTCHPIMPVASSFVLHCPDPVQKTNQCLQGQSLKTSLTLKVDRGSEETYRPEFPSTKGLVRSLAEQFQRMQGVSMRDSTGFKDRSLSGSLRKNSSPSDSKPPFSQGQEKGHWPWAKQQSSLEGGDRPLSWEESTEHSSLALNSGLPNGETSSGGQPRLAEPDIYQEKLSQVRDVRSKDLGSSTDLGTSLPLDSWVNITRFCDSQLKHGAPRPGMKSSPHDSHTCVTYPERNHILLHPHWNQDTEQETSELESLYQASLQASQAGCSGWGQQDTAWHPLSQTGSADGMGRRLHSAHDPGLSKTSTAEMEHGLHEARTATPCRGLSRECGEDEQYSAENLRRISRSLSGTVVSEREEAPVSSHSFDSSNVRKPLETGHRCSSSSSLPVIHDPSVFLLGPQLYLPQPQFLSPDVLMPTMAGEPNRLPGTSRSVQQFLAMCDRGETSQGAKYTGRTLNYQSLPHRSRTDNSWAPWSETNQHIGTRFLTTPGCNPQLTYTATLPERSKGLQVPHTQSWSDLFHSPSHPPIVHPVYPPSSSLHVPLRSAWNSDPVPGSRTPGPRRVDMPPDDDWRQSSYASHSGHRRTVGEGFLFVLSDAPRREQIRARVLQHSQW

SEQ ID NO: 2587 - protein, 351 aa, Homo sapiens
MKGRAVSFDPLACQGLNASPGSLTSPLRRIRSLTGREVLTPFPGLGTAAAPAQGGAHLKPHSLVLPITALPPPPLALRGRQATSKLPPFLSSPFPPSLCPWVPDPGFKETAFLYAVSSAALTHTLARACSAGRMERCTCDDSPGLESRQAWQWGVCGDNLKYSTKFLSNFLGSKRGNKDLRARADAHNTHVGIKAVKSGLRTTCKCHGVSGSCAVRTCWKQLSPFRETGQVLKLRYDSAVKVSSATNEALGRLELWAPARQGSLTKGLAPRSGDLVYMEDSPSFCRPSKYSPGTAGRVCSREASCSSLCCGRGYDTQSRLVAFSCHCQVQWCCYVECQQCVQEELVYTCKH

SEQ ID NO: 2588 - protein, 702 aa, Homo sapiens [sequence omitted]

SEQ ID NO: 2589 - protein, 402 aa, Homo sapiens
MCELDILHDSLYQFCPELHLKRLNSLTLACHALLDCKTLTLTELGRNLPTKARTKHNIKRIDRLLGNRHLHKERLAVYRWHASFICSGNTMPIVLVDWSDIREQKRLMVLRASVALHGRSVTLYEKAFPLSEQCSKKAHDQFLADLASILPSNTTPLIVSDAGFKVPWYKSVEKLGWYWLSRVRGKVQYADLGAENWKPISNLHDMSSSHSKTLGYKRLTKSNPISCQILLYKSRSKGRKNQRSTRTHCHHPSPKIYSASAKEPWVLATNLPVEIRTPKQLVNIYSKRMQIEETFRDLKSPAYGLGLRHSRTSSSERFDIMLLIALMLQLTCWLAGVHAQKQGWDKHFQANTVRNRNVLSTVRLGMEVLRHSGYTITREDLLVAATLLAQNLFTHGYALGKL

SEQ ID NO: 2590 - protein, 1091 aa, Homo sapiens
MQKRQGYCSYCRVQYNNLEQHLFSAQHRSLTRQSRRQICTSSLMERFLQDVLQHHPYHCQESSSTQDETHVNTGSSSEVVHLDDAFSEEEEEDEDKVEDEDATEERPSEVSEPIEELHSRPHKSQEGTQEVSVRPSVIQKLEKGQQQPLEFVHKIGASVRKCNLVDIGQATNNRSNLVRPPVICNAPASCLPESSNDRPVTANTTSLPPAAHLDSVSKCDPNKVEKYLEQPDGASRNPVPSSHVETTSFSYQKHKESNRKSLRMNSDKLVLWKDVKSQGKTLSAGLKFHERMGTKGSLRVKSPSKLAVNPNKTDMPSNKGIFEDTIAKNHEEFFSNMDCTQEEKHLVFNKTAFWEQKCSVSSEMKFDCISLQSASDQPQETAQDLSLWKEEQIDQEDNYESRGSEMSFDCSSSFHSLTDQSKVSAKEVNLSKEVRTDVQYKNNKSYVSKISSDCDDILHLVTNQSQMIVKEISLQNARHISLVDQSYESSSSETNFDCDASPQSTSDYPQQSVTEVNLPKEVHIGLVDKNYGSSSSEVSADSVFPLQSVVDRPPVAVTETKLRKKAHTSLVDNYGSSCSETSFDCDVSLESVVDHPQLTVKGRNLKGRQVHLKHKKRKPSSAKAHLDCDVSLGTVADESQRAVEKINLLKEKNADLMDMNCESHGPEMGFQADAQLADQSQVAEIERQKVDVDLENKSVQSSRSSLSSDSPASLYHSAHDEPQEALDEVNLKELNIDMEVRSYDCSSSELTFDSDPPLLSVTEQSHLDAEGKERHIDLEDESCESDSSEITFDSDIPLYSVIDQPEVAVYEEETVDLESKSNESCVSEITFDSDIPLHSGNDHPEVAVKEVIQKEEYIHLERKNDEPSGSEISSDSHAPLHSVTNSPEVAVKKLNPQKEEQVHLENKENEPIDSEVSLDYNIIFHSVTGRSEDPIKEISLHTKEHMYLENKSVFETSLDSDVPLQAATHKPEVIVKETWLQREKHAEFQGRSTEFSGSKTSLDSGVPHYSVTEPQVAVNKINRKKQYVLENKNDKCSGSEIILDSNVPPQSMTDQPQLAFLKEKHVNLKDKNSKSGDSKITFDSEQLQEAV

SEQ ID NO: 2591 - protein, 1211 aa, Homo sapiens [sequence omitted]

SEQ ID NO: 2592 - protein, 182 aa, Homo sapiens
MMERKASSWSFSVSLSSRDSPEGPRAPPPWWEVSFYQVPPPPKCVGLRALGFQGRWLQGATQGQHSLSHLVDTHEQQLLTWQVLCSGWRPLSDWQVAGPHIAAGRGQEGDRVPGEHSHRARFHVPPHKHADATGGLAGRRHQGPVGQVHGLGRGFLAGAHTSSAPSSAKAAWTHGSGDGRGA

SEQ ID NO: 2593 - protein, 120 aa, Homo sapiens [sequence omitted]

SEQ ID NO: 2594 - protein, 272 aa, Homo sapiens
MEACCLLQLPQRLLLLGAAALTATALETADLAELCGQTWQGDGLLLRSHAASRRFYFVAPDTDCGLWVQAAAPGDRIRFQFRFFLVYSLTPAPPALNTSSPAPADPCAPGSYLRFYEGPPGAPRPLGSPLCGLNIPVPVASSGPFLGLRLVTRGRQPRVDFVGEVTSFRLGPCGAYFRCQNGRCIPSSLVCDPWGMDNCGDGSDQGSWSPADCRGPSPVPSQTGSTDAHTSRSLTPSPALGSAGSLWIAAERSSPAGRDPTRQDAALEGSTE

SEQ ID NO: 2595 - protein, 1233 aa, Homo sapiens
MYVYDGDSIYAPLIAVLSGLIVPEIRGNETVPEVVTTSGYALLHFFSDAAYNLTGFNIFYSINSCPNNCSGHGKCTTSVSVPSQVYCECDKYWKGEACDIPYCKANCGSPDHGYCDLTGEKLCVCNDSWQGPDCSLNVPSTESYWILPNVKPFSPSVGRASHKAVLHGKFMWVIGGYTFNYSSFQMVLNYNLESSIWNVGTPSRGPLQRYGHSLALYQENIFMYGGRIETNDGNVTDELWVFNIHSQSWSTKTPTVLGHGQQYAVEGHSAHIMELDSRDVVMIIIFGYSAIYGYTSSIQEYHISSNTWLVPETKGAIVQGGYGHTSVYDEITKSIYVHGGYKALPGNKYGLVDDLYKYEVNTKTWTILKESGFARYLHSAVLINGAMLIFGGNTHNDTSLSNGAKCFSADFLAYDIACDEWKILPKPNLHRDVNRFGHSAVVINGSMYIFGGFSSVLLNDILVYKPPNCKAFRDEELCKNAGPGIKCVWNKNHCESWESGNTNNILRAKCPPKTAASDDRCYRYADCASCTANTNGCQWCDDKKCISANSNCSMSVKNYTKCHVRNEQICNKLTSCKSCSLNLNCQWDQRQQECQALPAHLCGEGWSHIGDACLRVNSSRENYDNAKLYCYNLSGNLASLTTSKEVEFVLDEIQKYTQQKVSPWVGLRKINISYWGWEDMSPFTNTTLQWLPGEPNDSGFCAYLERAAVAGLKANPCTSMANGLVCEKPVVSPNQNARPCKKPCSLRTSCSNCTSNGMECMWCSSTKRCVDSNAYIISFPYGQCLEWQTATCSPQNCSGLRTCGQCLEQPGCGWCNDPSNTGRGHCIEGSSRGPMKLIGMHHNEMVLDTNLCPKEKNYEWSFIQCPACQCNGHSTCINNNVCEQCKNLTTGKQCQDCMPGYYGDPTNGGQCTACTCSGHANICHLHTGKCFCTTKGIKGDQCQLCDSENRYVGNPLRGTCYYSLLIDYQFTFSLLQEDDRHHTAINFIANPEQSNKNLDISINASNNFNLNITWSVGSTAGTISGEETSIVSKNNIKEYRDSFSYEKFNFRSNPNITFYVYVSNFSWPIKIQIAFSQHNTIMDLVQFFVTFFSCFLSLLLVAAVVWKIKQTCWASRRREQLLRERQQMASRPFASVDVALEVGAEQTEFLRGPLEGAPKPIAIEPCAGNRAAVLTVFLCLPRGSSGAPPPGQSGLAIASALIDISQQKASDSKDKTSGVRNRKHLSTRQGTCV

SEQ ID NO: 2596 - protein, 150 aa, Homo sapiens
MADTSPPTKLEHPRSTSDCCAGSKNFNPVDLSFLGSMGVGSTDQDHLAPWFQPPFQGSEWFCLSGIPDNSGVRKKLLQLAQCLPKWPLSFVLEIQGPCGVGTQGISLSVDCEDHGKSVVSGPECTPTHGMVPHGFPWLGEGVPQPLALPR

SEQ ID NO: 2597 - protein, 446 aa, Homo sapiens
MISRIFTLRIVSGNAGESTSELIKVLKCVLVGLESPPLSVSEERQLAVLTELPFVVPFEERVKIFQRLIYADKQEVQGDGPFLDGINVTIRRNYIYEDAYDKLSPENEPDLKKRIRVHLLNAHGLDEAGIDGGGIFREFLNELLKSGFNPNQGFFKTTNEGLLYPNPAAQMLVGDSFARHYYFLGRMLGKALYENMLVELPFAGFFLSKLLGTSADVDIHHLASLDPEVYKNLLFLKSYEDDVEELGLNFTVVNNDLGEAQVVELKFGGKDIPVTSANRIAYIHLVADYRLNRQIRQHCLAFRQGLANVVSLEWLRMFDQQEIQVLISGAQVPISLEDLKSFTNYSGGYSADHPVIKVFWRVVEGFTDEEKRKLLKFVTSCSRPPLLGFKELYPAFCIHNGGSDLERLPTASTCMNLLKLPEFYDETLLRSKLLYAIECAAGFELS

SEQ ID NO: 2598 - protein, 376 aa, Homo sapiens [sequence omitted]

SEQ ID NO: 2599 - protein, 871 aa, Homo sapiens [sequence omitted]

SEQ ID NO: 2600 - protein, 370 aa, Homo sapiens [sequence omitted]

SEQ ID NO: 2601 - protein, 167 aa, Homo sapiens [sequence omitted]

SEQ ID NO: 2602 - protein, 127 aa, Homo sapiens [sequence omitted]

SEQ ID NO: 2603 - protein, 342 aa, Homo sapiens [sequence omitted]

SEQ ID NO: 2604 - protein, 234 aa, Homo sapiens [sequence omitted]

SEQ ID NO: 2605 - protein, 163 aa, Homo sapiens
MGVPRAREGRGAGSQSPPRGRCLHPFRWGSQDRGRGEGLALSPLLPGVPPPPAMGVPRDRGGRGAGSQSTPRGGCLLPPRLGSQQPAGEEGLVLSPRLAGDASPCCDGSPKSQGVKRGWLSVPTSRGVPPPPAIGVLIARGGRGAGSQSLPRGWSFTPLRWGS

SEQ ID NO: 2606 - protein, 124 aa, Homo sapiens
MEKLICKFKMVLFFFFFFETDSSFVTQAGVQWGNLSSLQPLPPGFKQFFCLSLLSTGTTGAHHHAQLIFVFLVETGVHHVGQAGLELLTSGDPPALASESAGITGMSHHAWLRSLFSVFSQVIS

SEQ ID NO: 2607 - protein, 143 aa, Homo sapiens
MVVGGGWGASGLSVALTWGLSSRRGWFPFSYTRVLDSDGSDRLHMSLQQGKSSSTGNLLDKDDLAIPPPDYGAASRAFPAQTASGFKQRPYSVAVPAFSQVSGRGRGWEGPAGGTVGSACSPPLEPPLRGGAPGGLGLWTALG

SEQ ID NO: 2608 - protein, 259 aa, Homo sapiens
MSQGPKTLVKEWRSQHWSARGEWELDGLALGWTHGLQPQLSCAVEPSSHLGMSCPLRLPGAGRPPRCRRALKGFRGSLCRRGQRLSVAAEGCGGPGWIADSRLDRRFGIADWGLDWGFGVGSGMWGLDRGFEDWIGDLGLDPGFGAGSAVGGSEKVTESSPCSGAGGWGSEKSPPPRSSSASGAAGARWPGLHRPRLHGSGYRIRDAEQRKIQGRLSRTGGGARPGAQEPETWRPGTSSTELLYIWPVPAAMWKWSLSW

SEQ ID NO: 2609 - protein, 176 aa, Homo sapiens [sequence omitted]

SEQ ID NO: 2610 - protein, 641 aa, Homo sapiens [sequence omitted]

SEQ ID NO: 2611 - protein, 129 aa, Homo sapiens [sequence omitted]

SEQ ID NO: 2612 - protein, 574 aa, Homo sapiens
MNPFYFHAVNIILHCLVTLVLMYTCDKTVFKNRGLAFVTALLFAVHPIHTEAVAGIVGRADVLACLLFLLAFLSYNRSLDQGCVGGSFPSTVSPFFLLLSLFLGTCAMLVKETGITVFGVCLVYDLFSLSNKQDKSSNGALCPRSPQQPGSPQPSSLPGHPHRENGKQQRFPHKGAWGGCHSPLPPEPKSSGFPVSPRAVWSMMRYLRASSNRNFLLTMRPFLKRAILVLSYVLVILYFRLWIMGGSMPLFSEQDNPASFSPYILTRFLTYSYLLAFNVWLLLAPVTLCYDWQVGSIPLVETIWDMRNLATIFLAVVMALLSLHCLAAFKRLEHKEVLVGLLFLVFPFIPASNLFFRVGFVVAERVLYMPSMGYCILFVHGLSKLCTWLNRCGATTLIVSTVLLLLLFSWKTVKQNEIWLSRESLFRSGVQTLPHNAKVHYNYANFLKDQGRNKEAIYHYRTALKLYPRHASALNNLGTLTRDTAEAKMYYQRALQLHPQHNRALFNLGNLLKSQEKKEEAITLLKDSIKYGPEFADAYSSLASLLAEQVIVSHSSFFQCYCYMYKLMLHRFLY

SEQ ID NO: 2613 - protein, 1111 aa, Homo sapiens [sequence omitted]

SEQ ID NO: 2614 - protein, 150 aa, Homo sapiens [sequence omitted]

SEQ ID NO: 2615 - protein, 207 aa, Homo sapiens [sequence omitted]

SEQ ID NO: 2616 - protein, 137 aa, Homo sapiens
MRKSFPLNLGGSDTCYFCKKRVYVMERLSAEGHFFHRECFRCSICATTLRLAAYTFDCDEGKFYCKPHFIHCKTNSKQRKRRAELKQQREEEATWQEQEAPRRDTPTESSCAVAAIGTLEGSPPVHFSLPVLHPLLG

SEQ ID NO: 2617 - protein, 486 aa, Homo sapiens
MAKVNRARSTSPPDGGWGWMIVAGCFLVTICTRAVTRCISIFFVEFQTYFTQDYAQTAWIHSIVDCVTMLCAPLGSVVSNHLSCQVGIMLGGLLASTGLILSSFATSLKHLYLTLGVLTGLGFALCYSPAIAMVGKYFSRRKALAYGIAMSGSGIGTFILAPVVQLLIEQFSWRGALLILGGFVLNLCVCGALMRPITLKEDHTTPEQNHVCRTQKEDIKRVSPYSSLTKEWAQTCLCCCLQQEYSFLLMSDFVVLAVSVLFMAYGCSPLFVYLVPYALSVGVSHQQAAFLMSILGVIDIIGNTTFGWLTDRRCLKNYQYVCYLFAVGMDGLCYLCLPMLQSLPLLVPFSCTFGYFDGAYVTLIPVVTTEIVGTTSLSSALGVVYFLHAVPYLVSPPIAGRLVDTTGSYTAAFLLCGFSMIFSSVLLGFARLIKRMRKTQLQFIAKESDPKLQLWTNGSVAYSVARELDQKHGEPVATAVPGYSLT

SEQ ID NO: 2618 - protein, 834 aa, Homo sapiens
MKVIVIHRKMFQRAQELRRRAEDYHKCKIPPSARKALCNWVRMAAAEHRHSSGLPYWPYLTAETLKNRMGHQPPPPTQQHSITDNSLSLKTPPECVLTPLPPSADDNLKTPPECVLTPLPPSADDNLKTPPECLLTPLPPSADDNLKTPPECLLTPLPPSADDNLKTPPECLLTPLPPSAPPSAPPSADDNLKTRAECLLHPLPPSADDNLKTPSERQLTPLPPSAPPSADDNIKTPAERLRGPLPPSADDNLKTPSERQLTPLPPSAPPSADDNIKTPAERLRGPLPPSADDNLKTPSERQLTPPPPSAPPSADDNIKTPAERLRGPLPPSADDNLKTPSERQLTPLPPSADDNIKTPAFHPQRMIISRHLPSVSSLPFHPQLHSQQMIISRYLLSVCGFRFHHQPMIISRHLPSVSSLPFHPQLHPQQMIISRHLPSVCGGRFHPQRMIISRHLPSVSSLPFHPQLHPQQMIISRHLPSVCGGRFHPQRMIISRHLPSVSSLPFHPQLHPQQMIISRHLPSVCGGRFHPQRMIISRHLPSVSSLPFHPQLHPQQMIISRHLPSVCGERLRGPLPPSADDNLKTPSERQLTPLPPSAPPSADDNIKTPAERLRGPLPPSADDNLKTPSERQLTPLPPSAPPSADDNIKTPAERLRGPLPPSADDNLKTPSERQLTPLPPSAPPSADDNIKTPAERLRGPLPPSADDNLKTPPLATQEAEAEKPRKPKRQRAAEMEPPPEPKRRRVGDVEPSRKPKRRRAADVEPSSPEPKRRRVGDVEPSRKPKRRRAADVEPSSPEPKRRRVGDVEPSRKPKRRRAADVEPSLPEPKRRRLS

SEQ ID NO: 2619 - protein, 102 aa, Homo sapiens
MCRILLRKEVLRLVINLSSSVSTKCHETGLLTIKEKYPQTFDDICLYSEVSHLLSHCTFRLPCRRFIQELFQDVQFLQMHEEAEAVLAIPPKQPIVDTSTES

SEQ ID NO: 2620 - protein, 254 aa, Homo sapiens
MLKTPPTAVTEHDVNVAFQQSAHKVLLDDDNLLPLLHLTIEYHGKEHKDATQAREGPSRETSPREAPASGWAALGLSYKVQWPLHILFTPAVLEKYNVVFKYLLSVRRVQAELQHCWALQMQRKHLKSNQTDAIKWRLRNHMAFLVDNLQYYLQVDVLESQFSQLLHQINSTRDFESIRLAHDHFLSNLLAQSFILLKPVSKAHWFPQTASTTDHSLRQFELTGYETIIKQLFKSILKHFLRMCKAAGHGGSCL

SEQ ID NO: 2621 - protein, 1455 aa, Homo sapiens [sequence omitted]

SEQ ID NO: 2622 - protein, 116 aa, Homo sapiens [sequence omitted]

SEQ ID NO: 2623 - protein, 106 aa, Homo sapiens
MVTKATFHQKTQCWACEEGVQQSFHCPCRLQAAASVERYTELLKEFLFKVQSSDWMPCWIPLLPQALITLSSCSLGKCTFYTNVRQFPQLPLLDIKEFTFLTIFQS

SEQ ID NO: 2624 - protein, 343 aa, Homo sapiens
MFHLLVGLVLAFPALQCQDFSGISLGTGDLHIFHLVTMAHIIQILLTSCTEENGMDQENPPCEEESAVLALYKTLHQYTGSALKEIPSGWHLWRSVRAGIMPFLKCSALFFHYLNGVPSPPDIQVPGTSHFEHLCSYLSLPNNLICLFQENSEIMNSLIESWCRNSEVKRYLEGERDAIRYPRESNKLINLPEDYSSLINQASNFSCPKSGGDKSRAPTLCLVCGSLLCSQSYCCQTELEGEDVGACTAHTYSCGSGVGIFLRVRECQVLFLAGKTKGCFYSPPYLDDYGETDQGLRRGNPLHLCKERFKKIQKLWHQHSVTEEIGHAQEANQTLVGIDWQHL

SEQ ID NO: 2625 - protein, 128 aa, Homo sapiens [sequence omitted]

SEQ ID NO: 2626 - protein, 223 aa, Homo sapiens [sequence omitted]

SEQ ID NO: 2627 - protein, 533 aa, Homo sapiens
MNYEGARSERENHAADDSEGGALDMCCSERLPGLPQPIVMEALDEAEGLQDSQREMPPPPPPSPPSDPAQKPPPRGAGSHSLTVRSSLCLFAASQFLLEPTAWLDSGTWGVPSLLLVFLSVGLVLVTTLVWHLLRTPPEPPTPLPPEDRRQSVSRQPSFTYSEWMEEKIEDDFLDLDPVPETPVFDCVMDIKPEADPTSLTVKSMGLQERRGSNVSLTLDMCTPGCNEEGFGYLMSPREESAREYLLSASRVLQAEELHEKALDPFLLQAEFFEIPMNFVDPKEYDIPGLVRKNRYKTILPNPHSRVCLTSPDPDDPLSSYINANYIRGYGGEEKVYIATQGPIVSTVADFWRMVWQEHTPIIVMITNIEEMNEKCTEYWPEEQVAYDGVEITVQKVIHTEDYRLRLISLKSGTEERGLKHYWFTSWPDQKTPDRAPPLLHLVREVEEAAQQEGPHCAPIIVHCSAGIGRTGCFIATSICCQQLRQEGVVDILKTTCQLRQDRGGMIQTCEQYQFVHHVMSLYEKQLSHQSPE

SEQ ID NO: 2628 - protein, 111 aa, Homo sapiens [sequence omitted]

SEQ ID NO: 2629 - protein, 123 aa, Homo sapiens [sequence omitted]

SEQ ID NO: 2630 - protein, 110 aa, Homo sapiens [sequence omitted]

SEQ ID NO: 2631 - protein, 138 aa, Homo sapiens [sequence omitted]

SEQ ID NO: 2632 - protein, 303 aa, Homo sapiens
MSHLQGQPPADPQPRPALPAAPWACLCPHSHPVHSCVSVAGDRGWGKGLRYTRGCRDPQHGCPGSSLWKCRIGSGPQSCAGPSVPSPSPESLLPASAAPRVVGATSLGSGLGAFVMPAWGLSKSSPRGLSKSSPRGLSKSSPRGLSMSSPRGLSKSSPRGLSKSSPWGLSKSSPRGLSMSSPRGLSKSSPRGLSKSSPWGLSKSFLCRLSKSSPWVLSMSSPQGLSKSSPRGLSKSSPRGLSMSSPRGLSKSSPRGLIMSSPRGLSMSSPRGLSKSSPWGLSMSSPRGLSKSSPRGLCPPHGV

SEQ ID NO: 2633 - protein, 176 aa, Homo sapiens [sequence omitted]

SEQ ID NO: 2634 - protein, 465 aa, Homo sapiens
MGGAVVDEGPTGVKAPDGGWGWAVLFGCFVITGFSYAFPKAVSVFFKELIQEFGIGYSDTAWISSILLAMLYGTGPLCSVCVNRFGCRPVMLVGGLFASLGMVAASFCRSIIQVYLTTGVITGLGLALNFQPSLIMLNRYFSKRRPMANGLAAAGSPVFLCALSPLGQLLQDRYGWRGGFLILGGLLLNCCVCAALMRPLVVTAQPGSGPPRPSRRLLDLSVFRDRGFVLYAVAASVMVLGLFVPPVFVVSYAKDLGVPDTKAAFLLTILGFIDIFARPAAGFVAGLGKVRPYSVYLFSFSMFFNGLADLAGSTAGDYGGLVVFCIFFGISYGMVGALQFEVLMAIVGTHKFSSAIGLVLLMEAVAVLVGPPSGGKLLDATHVYMYVFILAGAEVLTSSLILLLGNFFCIRKKPKEPQPEVAAAEEEKLHKPPADSGVDLREVEHFLKAEPEKNGEVVHTPETSV

SEQ ID NO: 2635 - protein, 176 aa, Homo sapiens [sequence omitted]

SEQ ID NO: 2636 - protein, 200 aa, Homo sapiens
MNGHFSGEDIYAAKKHMKRCSSSLAIGEVQVRTTVGYHLTPVRMAVVRKSGSNGCWRGCGEVGTLLHCWWDCRLVQPLGGSVWPFLGDLEVEVPFDPAIPLLGMYPKDYGSCCYRDACTRVFIVALFTVAKTWNQLKCPAMIDWIQEVWRMYTMEYYAAIENDGFMSFVGTWMKLEIIILSKLSQEQKTKHCIFSLIGGN

SEQ ID NO: 2637 - protein, 103 aa, Homo sapiens [sequence omitted]

SEQ ID NO: 2638 - protein, 159 aa, Homo sapiens
MALLHTRLRTSARPLLACGSRSGCGEWVERASCRPVWGSYSLGFLQVRSLLKGSIAARQLCLHRGPCLKNIDFTTIVGCLGYSLLFHLTVCCQIFTHILECFLKIKIQVVKLPDQGIGYIFPRLRFRKAVDEVLGAFLFHRSPPELGLHQICVLCRVSR

SEQ ID NO: 2639 - protein, 991 aa, Homo sapiens [sequence omitted]

SEQ ID NO: 2640 - protein, 830 aa, Homo sapiens
MKRGRLPSSSEDSDDNGSLSTTWSQNSRSQHRRSSCSRHEDRKPSEVFRTDLITAMKLHDSYQLNPDEYYVLADPWRQEWEKGVQVPVSPGTIPQPVARPKKYIVSSGSEPPELGYVDIRTLADSVCRYDLNDMDAAWLELTNEEFKEMGMPELDEYTMERVLEEFEQRCYDNMNHAIETEEGLGIEYDEDVVCDVCQSPDGEDGNEMVFCDKCNICVHQACYGILKVPEGSWLCRTCALGVQPKCLLCPKKGGAMKPTRSGTKWVHVSCALWIPEVSIGSPEKMEPITKVSHIPSSRWALVCSLCNEKFGASIQCSVKNCRTAFHVTCAFDRGLEMKTILAENDEVKFKSYCPKHSSHRKPEESLGKGAAQENGAPECSPRNPLEPFASLEQNREEAHRVSVRKQKLQQLEDEFYTFVNLLDVARALRLPEEVVDFLYQYWKLKRKVNFNKPLITPKKDEEDNLAKREQDVLFRRLQLFTHLRQDLERVRNLTYMVTRREKIKRSVCKVQEQIFNLYTKLLEQERVSGVPSSCSSSSLENMLLFNSPSVGPDAPKIEDLKWHSAFFRKQMGTSLVHSLKKPHKRDPLQNSPGSEGKTLLKQPDLCGRREGMVVPESFLGLEKTFAEARLISAQQKNGVVMPDHGKRRDNRFHCDLIKGDLKDKSFKQSHKPLRSTDVSQRHLDNTRAATSPGVGQSAPGTRKEIVPKCNGSLIKVNYNQTAVKVPTTPASPVKNWGGFRIPKKGERQQQGEAHDGACHQHSDYPYLGLGRVPAKERAKSKLKSDNENDGYVPDVEMSDSESEASEKKCIHTSSTISRRTDIIRRSILAS

SEQ ID NO: 2641 - protein, 136 aa, Homo sapiens [sequence omitted]

SEQ ID NO: 2642 - protein, 1265 aa, Homo sapiens
MEAEKDSGRRLRPIDRQRYDENEDLSDVEEIVSVRGFSLEEKLRSQLYQGDFVHAMEGKDFNYEYVQREALRVPLIFREKDGLGIKMPDPDFTVRDVKLLVGSRRLVDVMDVNTQKGTEMSMSQFVRYYETPEAQRDKLYNVISLEFSHTKLEHLVKRPTVVDLVDWVDNMWPQHLKEKQTEATNAIAEMKYPKVKKYCLMSVKGCFTDFHIDFGGTSVWYHVFRGGKIFWLIPPTLHNLALYEEWVLSGKQSDIFLGDRVERCQRIELKQGYTFFIPSGWIHAVYTPVDSLVFGGNILHSFNVPMQLRIYEIEDRTRVQPKFRYPFYYEMCWYVLERYVYCVTQRSHLTQEYQRESMLIDAPRKPSIDGFSSDSWLEMEEEACDQQPQEEEEKDEEGEGRDRAPKPPTDGSTSPTSTPSEDQEALGKKPKAPALRFLKRTLSNESEESVKSTTLAVDYPKTPTGSPATEVSAKWTHLTEFELKGLKALVEKLESLPENKKCVPEGIEDPQALLEGVKNVLKEHADDDPSLAITGVPVVTWPKKTPKNRAVGRPKGKLGPASAVKLAANRTTAGARRRRTRCRKCEACLRTECGECHFCKDMKKFGGPGRMKQSCIMRQCIAPVLPHTAVCLVCGEAGKEDTVEEEEGKFNLMLMECSICNEIIHPGCLKIKESEGVVNDELPNCWECPKCNHAGKTGKQKRGPGFKYASNLPGSLLKEQKMNRDNKEGQEPAKRRSECEEAPRRRSDEHSKKVPPDGLLRRKSDDVHLRKKRKYEKPQELSGRKRLKPGKEDKLFRKKRRSWKNAEDRMALANKPLRRFKQEPEDELPEAPPKTRESDHSRSSSPTAGPSTEGAEGPEEKKKVKMRRKRRLPNKELSRELSKELNHEIQRTENSLANENQQPIKSEPESEGEEPKRPPGICERPHRFSKGLNGTPRELRHQLGPSLRSPPRVISRPPPSVSPPKCIQMERHVIRPPPISPPPDSLPLDDGAAHVMHREVWMAVFSYLSHQDLCVCMRVCRTWNRWCCDKRLWTRIDLNHCKSITPLMLSGIIRRQPVSLDLSWTNISKKQLSWLINRLPGLRDLVLSGCSWIAVSALCSSSCPLLRTLDVQWVEGLKDAQMRDLLSPPTDNRPGQMDNRSKLRNIVELRLAGLDITDASLRLIIRHMPLLSKLHLSYCNHVTDQSINLLTAVGTTTRDSLTEINLSDCNKVTDQCLSFFKRCGNICHIDLRYCKQVTKEGCEQFIAEMSSFQGRSCSTTRLGDE

SEQ ID NO: 2643 - protein, 1393 aa, Homo sapiens
MGCTTSVILFKGIRTVFERNCAYMCKQQGENNALEYTAYNWTKEDSELLISSWLAKPKLIEPLDYENVIVQKKTQILNDCLREMLLFPYDDFQTAILRRQGRYICSTVPAKAEEEAQSLFVTECIKTYNSDWHLVNYKYEDYSGEFRQLPNKVVKLDKLPVHVYEVDEEVDKDEDAASLGSQKGGITKHGWLYKGNMNSAISVTMRSFKRRFFHLIQLGDGSYNLNFYKDEKISKEPKGSIFLDSCMGVVQNNKVRRFAFELKMQDKSSYLLAADSEVEMEEWITILNKILQLNFEAAMQEKRNGDSHEDDEQSKLEGSGSGLDSYLPELAKSAREAEIKLKSESRVKLFYLDPDAQKLDFSSAEPEVKSFEEKFGKRILVKCNDLSFNLQCCVAENEEGPTTNVEPFFVTLSLFDIKYNRKISADFHVDLNHFSVRQMLATTSPALMNGSGQSPSVLKGILHEAAMQYPKQGIFSVTCPHPDIFLVARIEKVLQGSITHCAEPYMKSSDSSKVAQKVLKNAKQACQRLGQYRMPFAWAARTLFKDASGNLDKNARFSAIYRQDSNKLSNDDMLKLLADFRKPEKMAKLPVILGNLDITIDNVSSDFPNYVNSSYIPTKQFETCSKTPITFEVEEFVPCIPKHTQPYTIYTNHLYVYPKYLKYDSQKSFAKARNIAICIEFKDSDEEDSQPLKCIYGRPGGPVFTRSAFAAVLHHHQNPEFYDEIKIELPTQLHEKHHLLLTFFHVSCDNSSKGSTKKRDVVETQVGYSWLPLLKDGRVVTSEQHIPVSANLPSGYLGYQELGMGRHYGPEIKWVDGGKPLLKISTHLVSTVYTQDQHLHNFFQYCQKTESGAQALGNELVKYLKSLHAMEGHVMIAFLPTILNQLFRVLTRATQEEVAVNVTRVIIHVVAQCHEEGLESHLRSYVKYAYKAEPYVASEYKTVHEELTKSMTTILKPSADFLTSNKLLKYSWFFFDVLIKSMAQHLIENSKVKLLRNQRFPASYHHAVETVVNMLMPHITQKFRDNPEASKNANHSLAVFIKRCFTFMDRGFVFKQINNYISCFAPGDPKTLFEYKFEFLRVVCNHEHYIPLNLPMPFGKGRIQRYQDLQLDYSLTDEFCRNHFLVGLLLREVGTALQEFREVRLIAISVLKNLLIKHSFDDRYASRSHQARIATLYLPLFGLLIENVQRINVRDVSPFPVNAGMTVKDESLALPAVNPLVTPQKGSTLDNSLHKDLLGAISGIASPYTTSTPNINSVRNADSRGSLISTDSGNSLPERNSEKSNSLDKHQQSSTLGNSVVRCDKLDQSEIKSLLMCFLYILKSMSDDALFTYWNKASTSELMDFFTISEVCLHQFQYMGKRYIASLTKCVALLLPAWNRNDACQIAAAGQPG

SEQ ID NO: 2644 - protein, 229 aa, Homo sapiens
MLYYTRGFQSMGMYSVMIQKVILHDVLKFLFVYIVFLLGFGVALASLIEKCPKDNKDCSSYGSFSDAVLELFKLTIGLGDLNIQQNSKYPILFLFLLITYVILTFVLLLNMLIALMGETVENVSKESERIWRLQRARTILEFEKMLPEWLRSRFRMGELCKVAEDDFRLCLRINEVKWTEWKTHVSFLNEDPGPVRRTDFNKIQDSSRNNSKTTLNAFEEVEEFPETSV

SEQ ID NO: 2645 - protein, 178 aa, Homo sapiens
MGWGNPIIAVFRTPFAPWLQFHWSAPFSAWLGTVLTHLHSSQQRSGTTVCPPCDNELKSEAIIEHLCASEFALRMKIKEVKKENGDKKIVPKKKKPLKLGPIKKKDLKKLVLYLKNGADCPCHQLDNLSHHFLIMGRKVKSQYLLTAIHKWDKKNKEFKNFMKKMKNHECPTFQSVFK

SEQ ID NO: 2646 - protein, 104 aa, Homo sapiens
MKCHMQIGLSLISLFREWVRTSNSSSCRWFQNGGPEGYCNWALTFIKNSKWSPVGFYECFTENGLRSWKIVYSNFSLISTLVFVMVWGWGVSIIAIQLAVLNIS

SEQ ID NO: 2647 - protein, 157 aa, Homo sapiens
MPDLPRSWQWRVRGSWQQWRYVCCLRRDKKLLTSLVPIPTLSVASSQVLFRASGGKPIAVLCLTVELQPHVVDQVFRFYHPELSFLKKAIRLPPWHTFPGAPVGMLGEDPPVHVRCSDPNVICETQNVGPGEPRDIFLKVASGPSPEIKDFFVIIYS

SEQ ID NO: 2648 - protein, 185 aa, Homo sapiens
MHMHAHTHHRLSPSTLCTGTHTHPCTHTHPCTHTHARARVHTHTSQVTSFNIVYRHTHIHALTHTCTHVCTHTHHRLPPSTLCTGAHTHPCTHTHMHARARAHTHITGYLLQHCVQAHTHIHALTHTHAHTRARACAHTHTHITGYLLQHCVEHRPASFSCKEPESEHFRLCGPDNLCCKDSALP

SEQ ID NO: 2649 - protein, 432 aa, Homo sapiens
MPAGRAARTCALLALCLLGAGAQDFGPTRFICTSVPVDADMCAASVAAGGAEELRSSVLQLRETVLQQKETILSQKETIRELTAKLGRCESQSTLDPGAGEARAGGGRKQPGSGKNTMGDLSRTPAAETLSQLGQTLQSLKTRLENLEQYSRLNSSSQTNSLKDLLQSKIDELERQVLSRVNTLEEGKGGPRNDTEERVKIETALTSLHQRISELEKGQKDNRPGDKFQLTFPLRTNYMYAKVKKSLPEMYAFTVCMWLKSSATPGVGTPFSYAVPGQANELVLIEWGNNPMEILINDKVAKLPFVINDGKWHHICVTWTTRDGVWEAYQDGTQGGSGENLAPYHPIKPQGVLVLGQEQDTLGGGFDATQAFVGELAHFNIWDRKLTPGEVYNLATCSTKALSGNVIAWAESHIEIYGGATKWTFEACRQIN

SEQ ID NO: 2650 - protein, 102 aa, Homo sapiens [sequence omitted]

SEQ ID NO: 2651 - protein, 102 aa, Homo sapiens
MSHRALPKIKKKSYYFFGMESHSVAQARVQWRDLGSLQPLPPGFKQFSCLSLLNSWDCWRLPPCPDRFCVFSGDGVSPCWSGWSRTPELVVQLPRPPKVLGL

SEQ ID NO: 2652 - protein, 423 aa, Homo sapiens
MDRKTLDWEIVELTNKLLDAKNTINKLEELNERYRLDCNLAVQLLKCNKSHFRNHKFADLPCELQDMVRKHLHSGQEAASPGPAPSLAPGAVVPTSVIARVLEKPESLLLNSAQSGSAGRPLAEDVFVHVDMSEGVPGDPASPPAPGSPTPQPNGECHSLGTARGSPEEELPLPAFEKLNPYPTPSPPHPLYPGRRVIEFSEDKVRIPRNSPLPNCTYATRQAISLSLVEEGSERARPSPVPSTPASAQASPHHQPSPAPLTLSAPASSASSEEDLLVSWQRAFVDRTPPPAAVAQRTAFGRDALPELQRHFAHSPADRDEVVQAPSARPEESELLLPTEPDSGFPREEEELNLPISPEEERQSLLPINRGTEEGPGTSHTEGRAWPLPSSSRPQRSPKRMGVHHLHRKDSLTQAQEQGNLLN

SEQ ID NO: 2653 - protein, 286 aa, Homo sapiens
MSATQEFGGGYTFPRAPRGAGAEAGWTPWAEVDGRGSVRGVVGAGVAGQGHARWRVGQGKSCDRHTDGKFIPSASVERISYCHRNLTKHRTNASHAFIGHRLCAWPTVCVLEPGHGIPDFNSEASNKRRLNPGGCHVSEVGNLQPPSHSLQVCSGGWGCVPVPAVSPWVAGHLLSGGKLMHFCPARTGVSTCSSCPCKVPQTGGFNNGKCPPAVLQANVPDGGVSRAGPSWGQEGGSSRPLSLALGWPSSPCAFTSSSPVSLYLHPHFPFMRTPAMGPGLPAKNPV

SEQ ID NO: 2654 - protein, 564 aa, Homo sapiens [sequence omitted]

SEQ ID NO: 2655 - protein, 137 aa, Homo sapiens [sequence omitted]

SEQ ID NO: 2656 - protein, 852 aa, Homo sapiens
MAIEAGLGDLPLLPFSSPSSPWSSDPFSFLQSVCHTVVVQGVSALLAFPQSQGEMMELDLVSLVLHIPVISIVRHEFPRESQNPLHLQLSLENSLSSDADVTVSILTMNNWYNFSLLLCQEDWNITDFLLLTQNNSKFHLGSIINITANLPSTQDLLSFLQIQLESIKNSTPTVVMFGCDMESIRRIFEITTQFGVMPPELRWVLGDSQNMEELRTEGLPLGLIAHGKTTQSVFEHYVQDAMELVARAVATATMIQPELALIPSTMNCMEVETTNLTSGQYLSRFLANTTFRGLSGSIRVKGSTIVSSENNFFIWNLQHDPMGKPMWTRLGSWQGRKIVMDYGIWPEQAQRHKTHFQHPSKLHLRVVTLIEHPFVFTREVDDEGLCPAGQLCLDPMTNDSSTLDSLFSSLHSSNDTVPIKFKKCCYGYCIDLLEKIAEDMNFDFDLYIVGDGKYGAWKNGHWTGLVGDLLRGTAHMAVTSFSINAARSQVIDFTSPFFSTSLGILVRTRDTAAPIGAFMWPLHWTMWLGIFVALHITAVFLTLYEWKSPFGLTPKGRNRSKVFSFSSALNICYALLFGRTVAIKPPKCWTGRFLMNLWAIFCMFCLSTYTANLAAVMVGEKIYEELSGIHDPKLHHPSQGFRFGTVRESSAEDYVRQSFPEMHEYMRRYNVPATPDGVEYLKNNPEKLDAFIMDKALLDYEVSIDADCKLLTVGKPFAIEGYGIGLPPNSPLTANISELISQYKSHGFMDMLHDKWYRVVPCGKRSFAVTETLQMGIKHFSGLFVLLCIGFGLSILTTIGEHIVYRLLLPRIKNKSKLQYWLHTSQRLHRAINTSFIEEKQQHFKTKRVEKR

SEQ ID NO: 2657 - protein, 422 aa, Homo sapiens
MVMVLSESLSTRGADSIACGTFSRELHTPKKMSQGPTLFSCGIMENDRWRDLDRKCPLQIDQPSTSIWECLPEKDSSLWHREAVTACAVTSLIKDLSISDHNGNPSAPPSKRQCRSLSFSDEMSSCRTSWRPLGSKVWTPVEKRRCYSGGSVQRYSNGFSTMQRSSSFSLPSRANVLSSPCDQAGLHHRFGGQPCQGVPGSAPCGQAGDTWSPDLHPVGGGRLDLQRSLSCSHEQFSFVEYCPPSANSTPASTPELARRSSGLSRSRSQPCVLNDKKVGVKRRRPEEVQEQRPSLDLAKMAQNCQTFSSLSCLSAGTEDCGPQSPFARHVSNTRAWTALLSASGPGGRTPAGTPVPEPLPPSFDDHLACQEDLSCEESDSCALDEDCGRRAEPAAAWRDRGAPGNSLCSLDGELDIEQIEKN

SEQ ID NO: 2658 - protein, 326 aa, Homo sapiens
MNNSPNFEEKKKFLTIFNLTHISAEKRKEPATQQASLDVEKPVGVAASLSDIPKAAEPGKLEQVRPQELSRVQELAPASGEKARLSEAPGGKKSLSMLHYIRGAAPKDIPVPLSHSTNGKSKPWEPFVAEEFAHQFHESVLQSTQKALQKHKGSVAVLSAEQNHKVDTSVHYNIPELQSSSRAPPPQHNGQQEPPTARKGPPTQELDRDSEEEEEEDDEDGEDEEEVPKRKWQGIEAVFEAYQEHIEEQNLERQVLQTQCRRLEARHYSLSLTAEQLSHSVAELRSQKQKMVSERERLQAELDHLRKCLALPAMHWPRGYLKGYPR

SEQ ID NO: 2659 - protein, 290 aa, Homo sapiens
MALLFEHRYSVDLLPFVQKAPKDSEAESKYDPPFGFRKFSSKVQTLLELLPEHDLPEHLKAKTCRRCVVIGSGGILHGLELGHTLNQFDVVIRLNSAPVEGYSEHVGNKTTIRMTYPEGAPLSDLEYYSNDLFVAVLFKSVDFNWLQAMVKKETLPFWVRLFFWKQVAEKIPLQPKHFRILNPVIIKETAFDILQYSEPQSRFWGRDKNVPTIGVIAVVLATHLCDEVSLAGFGYDLNQPRTPLHYFDSQCMAAMNFQTMHNVTTETKFLLKLVKEGVVKDLSGGIDREF

SEQ ID NO: 2660 - protein, 161 aa, Homo sapiens [sequence omitted]

SEQ ID NO: 2661 - protein, 104 aa, Homo sapiens
MGMDGRGQPSLLGFSPQILLLDGHVQSRPMQRTAGLRVLSCLPQCGGEWRWLWGTPHPMGFTLWNRHYQASLLSVRHKKGLTHFPWSLHISHYLCAQQKSVFTC

SEQ ID NO: 2662 - protein, 408 aa, Homo sapiens
MDAEACLRGLHLHIVPCKHVLSWPPSSPGPPETTARPTPGAAPVPPALYSSPSPQAVQVGGTASLHCDVSGRPPPAVTWEKQSHQRENLIMRPDQMYGNVVVTSIGQLVLSNARPEDAGLYTCTARNAAGLLRADFPLSVVQREPARDAAPSIPAPAECLPDVQACTGPTSPHLVLWHYDPQRGGCMTFPARGCDGAARGFETYEACQQACARGPGDACVLPAVQGPCRGWEPRWAYSPLLQQCHPFVYGGCEGNGNNFHSRESCEDACPVPRTPPCRACRLRSKLALSLCRSDFAIVGRLTEVLEEPEAAGGIARVALEDVLKDDKMGLKFLGTKYLEVTLSGMDWACPCPNMTAGDGPLVIMGEVRDGVAVLDAGSYVRAASEKRVKKILELLEKQACELLNRFQD

SEQ ID NO: 2663 - protein, 215 aa, Homo sapiens
MEWLRRHLENGKETLQHADPPKAHVTQHPISDHEATLRCWALGLYPAEITLTWQQDGEDQTQDTELVETRPAGDGTFQKWVAVVVPSGEEQRYMCHVQHEGLPEPLTLRWEPSSQPTIPIVGIVAGLFLLGAVVTGAVVAAAMWRKKSSGSNCAQYSDASHDTCKEDYACSCSGVCVLISFSPGCPSSLTAAGVIFPVINPTRWKAAPAHRSLWY

SEQ ID NO: 2664 - protein, 984 aa, Homo sapiens [sequence omitted]

SEQ ID NO: 2665 - protein, 108 aa, Homo sapiens [sequence omitted]

SEQ ID NO: 2666 - protein, 132 aa, Homo sapiens [sequence omitted]

SEQ ID NO: 2667 - protein, 373 aa, Homo sapiens
MGSQVSVESGALHVVIVGGGFGGIAAASQLQALNVPFMLVDMKDSFHHNVAALRASVETGFAKKTFISYSVTFKDNFRQGLVVGIDLKNQMVLLQGGEALPFSHLILATGSTGPFPGKFNEVSSQQAAIQAYEDMVRQVQRSRFIVVVGGGSAGVEMAAEIKTEYPEKEVTLIHSQVALADKELLPSVRQEVKEILLRKGVQLLLSERVSNLEELPLNEYREYIKVQTDKGTEVATNLVILCTGIKINSSAYRKAFESRLASSGALRVNEHLQVEGHSNVYAIGDCADVRTPKMAYLAGLHANIAVANIVNSVKQRPLQAYKPGALTFLLSMGRNDGVGQISGFYVGRLMVRLTKSRDLFVSTSWKTMRQSPP

SEQ ID NO: 2668 - protein, 478 aa, Homo sapiens
MSSCQGSLHGPRRPQPGASGRSTHTDGGGSSPAGEQEPSQHRTGAAVQRKPWPSGGLWRQDQQPGPGEAPHTQAFGEWPWGQELGSRAPGLGGDAGSPAPPFHSSSYRISLAGVEPSLVQAALGQLVRLSCSDDTAPESQAAWQKDGQPISSDRHRLQFDGSLIIHPLQAEDAGTYSCGSTRPGRDSQKIQLRIIGGDMAVLSEAELSRFPQPRDPAQDFGQAGAAGPLGAIPSSHPQPANRLRLDQNQPRVVDASPGQRIRMTCRAEGFPPPAIEWQRDGQPVSSPRHQLQPDGSLVISRVAVEDGGFYTCVAFNGQDRDQRWVQLRVLGELTISGLPPTVTVPEGDTARLLCVVAGESVNIRWSRNGLPVQADGHRVHQSPDGTLLIYNLRARDEGSYTCSAYQGSQAVSRSTEVKVVSPAPTAQPRDPGRDCVDQPELANCDLILQAQLCGNEYYSSFCCASCSRFQPHAQPIWQ

SEQ ID NO: 2669 - protein, 170 aa, Homo sapiens [sequence omitted]

SEQ ID NO: 2670 - protein, 638 aa, Homo sapiens
MAEHRSMDGRMEAATRGGSHLQAAAQTPPRPGPPSAPPPPPKEGHQEGLVELPASFRELLTFFCTNATIHGAIRLVCSRGNRLKTTSWGLLSLGALVALCWQLGLLFERHWHRPVLMAVSVHSERKLLPLVTLCDGNPRRPSPVLRHLELLDEFARENIDSLYNVNLSKGRAALSATVPRHEPPFHLDREIRLQRLSHSGSRVRVGFRLCNSTGGDCFYRGYTSGVAAVQDWYHFHYVDILALLPAAWEDSHGSQDGHFVLSCSYDGLDCQARQFRTFHHPTYGSCYTVDGVWTAQRPGITHGVGLVLRVEQQPHLPLLSTLAGIRVMVHGRNHTPFLGHHSFSVRPGTEATISIREDEVHRLGSPYGHCTAGGEGVEVELLHNTSYTRQACLVSCFQQLMVETCSCGYYLHPLPAGAEYCSSARHPAWGHCFYRLYQDLETHRLPCTSRCPRPCRESAFKLSTGTSRWPSAKSAGWTLATLGEQGLPHQSHRQRSSLAKINIVYQELNYRSVEEAPVYSVPQLLSAMGSLCSLWFGASVLSLLELLELLLDASALTLVLGGRRLRRAWFSWPRASPASGASSIKPEASQMPPPAGGTSDDPEPSGPHLPRVMLPGVLAGVSAEESWAGPQPLETLDT

SEQ ID NO: 2671 - protein, 637 aa, Homo sapiens
MRRVVLLLGLLNEDDACHASFLRVSKMRLSVFLKKQEESQFHPLEWLAREACNQDALQEAGTFRHTLWKRVQGAVTPLLASMISFIDRDGNLELLTRPDTPPWARDLWMFIFSDTMLLNIPLVMNNERHKGEMAYIVVQNHMNLSENASNNVPFSWKIKDYLEELWVQAQYITDAEGLPKKFVDIFQQTPLGRFLAQLHGEPQQELLQCYLKDFILLTMRVSTEEELKFLQMALWSCTRKLKAASEAPEEEVSLPWVHLAYQRFRSRLQNFSRILTIYPQVLHSLMEARWNHELAGCEMTLDAFAAMACTEMLTRNTLKPSPQAWLQLVKNLSMPLELICSDEHMQGSGSLAQAVIREVRAQWSRIFSTALFVEHVLLGTESRVPELQGLVTEHVFLLDKCLRENSDVKTHGPFEAVMRTLSECKETASKTLSRFGIQPCSICLGDAKDPVCLPCDHVHCLRCLRAWFASEQMICPYCLTALPDEFSPAVSQAHREAIEKHARFRQMCNSFFVDLVSTICFKDNAPPEKEVIESLLSLLFVQKGRLRDAAQRHCEHTKSLSPFNDVVDKTPVIRSVILKLLLKYSFHDVKDYIQEYLTLLKKKAFITEDKTELYMLFINCLEDSILETPVLTPEMMN

SEQ ID NO: 2672 - protein, 144 aa, Homo sapiens [sequence omitted]

SEQ ID NO: 2673 - protein, 103 aa, Homo sapiens
MWSVGVIAYMLLSGLSPFLGDNDAETLNNILACRWDLEDEEFQDISEEAKEFISKLLIKEKSWRISASEALKHPWLSDHKLHSRLNAQKKKNRGSDAQDFVTK

SEQ ID NO: 2674 - protein, 118 aa, Homo sapiens [sequence omitted]

SEQ ID NO: 2675 - protein, 140 aa, Homo sapiens
MKGQEGIRGEGCTDPEIKASPQMWAARFRGMRSRFSPLFSQATEMGPRVSAGWCLSGGGRKVSSLQGDFPPGGFWALSNDSALSLPPLSLPHPHPLRPPGLGVNEFTQGLHPPLHPAASVFQTCFYRKPHYCSTLRPTTT

SEQ ID NO: 2676 - protein, 173 aa, Homo sapiens
MLTSCFPEHCEPRQQTGLWEPQLEANWSVPEAQTVYRYVSEGSFGDGALNPCDRTLPRVHTVGTELEGSSDPCVVHGEDPSHPPSVWTTVVVGGGETRCESFSLKQRGSRKLQEFPKKETQSASRHTKHSCFDDRERNASLPATPASTPQAEEQELWRARGAGEVSPHCPWGV

SEQ ID NO: 2677 - protein, 129 aa, Homo sapiens
MCHLIFLQVGFIDYIVHPLWETWADLVQPDAQDILDTLEDNRNWYQSMIPQSPSPPLDEQNRDCQGLMEKFQFELTLDEEDSEGPEKEGEGHSYFSSTKTPCVIDPENRDSLGETDIDIATEDKSPVDT

SEQ ID NO: 2678 - protein, 100 aa, Homo sapiens
MREEESAIIPESPGLGCLKEGEERHPALPPAHGPCQLPRGPHLSQRAPLDGLHHHSLVLLLDVKAIVLLLGQDLGAQGRRNPVRERGGPTASPTVAPTGP

SEQ ID NO: 2679 - protein, 254 aa, Homo sapiens
MDQSSEGCMKKISSVNLDKLINDFSQIEKKMVETNGKNNILDIQLEKSNCLLKVMQAKEVSIKEECATLHNIIKGLQQTIEYQQNLKGENEQLKISADLIKEKLKSHEQEYKNNIAKLVSEMKIKEEGYKKEISKLYQDMQRKVELNEEKHKELIEKKEMEISELNAKLRSQEKEKQNEIIKLQLEFDAKLARVQTKSKSYQDSTVLPQSIYRRKLQHFQEEKNKEIAILRNTIRDLEQRLSVGKDSHLKRRRF

SEQ ID NO: 2680 - protein, 172 aa, Homo sapiens [sequence omitted]

SEQ ID NO: 2681 - protein, 101 aa, Homo sapiens
MDAEKAFDKNHTFIIKAFNKLGIEGNYLNIIKAIYEKPTTIMLTSPHLKTDSFSPKIRYKGKMPTLSTSVQHSTGSPHQRNYTRKNNISKLERKKYNYLYS

SEQ ID NO: 2682 - protein, 259 aa, Homo sapiens
MVSGRWAPPRQGWASRRLPQAQVVLKSGSPGPASQQVSKLFWLNSCPAPNRLCRPRTFSSQALRAHLLPPGGLYSSSTGWRTASAGPALASQGPLQAQLLPPRRPPGARSLLGGRRGLGPGRSRWGESWAWRLPWEATAGSADALLQPELGLFSHWEKGCGSEELGCRNFGVYKRRRELSQKSLFAGRWEMQPGGTAGQCGRQRPGLLKLASQTHLQPPGAPSGPSSSSRLHLQAGLWPDSRSQQRLWTQLLPSSQRPW

SEQ ID NO: 2683 - protein, 981 aa, Homo sapiens
MSEQERIQECLRKEIRSLLISTKDGLSPQELEKEYLLMVGNHLPLRILGYRSTMELVLDMPDVVRVCPGAGGTVILKAIPDESTKGIASLVAKQRSSHKLRNSMHKGRPSIYSGPRSHRRVPYRGRVAPILPAVVKSELKDLLALSPVLLSDFEKAFAKRFGRSFQYMQYGFLSMFEVLNAASDVISVEQTRAGSLLMLKKSVTEEKPRGCPAGKIFTQPFRMKQGSYSTGFPVAKPCFSQPTSNMEPPKQIMSMEKTSKLNVVETSRLNHTEKLNQLENTFKSVIAQIGPGGTISSELKHKIKFVVSKFPEGLFISKLLGEYEVIFKEQLSPKKLGFLNVTELVGALSDILHVEFRKGHQDLLVFDADKKPLPPVQSDKKIEAKACVSSPPRNSLSTAAVKETVWNCPSKKQKEPQQKICKKPNLVVKPLQLQVETNKSELNLAMANHDIPPDAVPNKKLCRLPPLDTSSLIGVFVEYIISPSQFYIRIYSRDSSELLEDMMIEMRRCYSNQLVSDRYVMPECFIQPGHLCCVRISEDKWWYRVIIHRVLEKQEVEVFYPDFGNIGIVQKSSLRFLKCCYTKLPAQAIPCSLAWVRPVEEHWTSKAILQFQKLCGLKPLVGVVDEYVDGILNIFLCDTSSNEDVYFHHVLRTEGHAIVCRENISSKGFSELNPLALYTTSSGGPEDIVLTELGYPSQQHYFNEDRKISPQSKESELRILDEIPTGMPCLESVTIGDDIWDENWLPLQAKMGKGGDAASHLFTASLGGKNQYSSCKEMPQKDWCFSTPKDTWDDSWQPSGLVNGTKVEVHKPEVLGAQEKNTGTNRTQKQLDINGSSDSSTLPKLEEFCTSLTQSEQSADGSQSEPNNSQTQPKQIQLSTAAPCSTTAVDDSAEKPSGSVESSPEILKNEDFSSSRAITLYKDKRQESVDQLSLILSYECQISQKLYIPRSTATAALGAAARLATSRSLLHWYPSVKRMEA

SEQ ID NO: 2684 - protein, 119 aa, Homo sapiens [sequence omitted]

SEQ ID NO: 2685 - protein, 298 aa, Homo sapiens
MGYVRRDSHRLMVTALPPACQLVQVALGCFALRLECEILGEVLAQLGTSVLPAEELLQARRASGDVASCVAWLQQRLAQDEEPPPLPPRGSPAAYRAPLDLYRDLQEDEGSEDASLYGEPSPGPDSPPAELAYRPPLWEQSAKLWGTGGRAWEPPAEELPQASSPPYGALEEGLEPEPSAFSFLSLRRELSRPGDLATPESSAAASPRRIRAEGVPASAYRSVSEPPGYQAHSCLSPGALPTLCCDTCRQLHAAHCAALPACRPGHSLRVLLGDAQRRLWLQRAQMDTLLYNSPGARP

SEQ ID NO: 2686 - protein, 187 aa, Homo sapiens
MASPGSGFWSFGSEDGSGDSENPGTARAWCQVAQKFTGGIGNKLCALLYGDAEKPAESGGSQPPRAAARKAACACDQKPCSCSKVDVNYAFLHATDLLPACDGERPTLAFLQDVMNILLQYVVKSFDRSTKVIDFHYPNELLQEYNWELADQPQNLEEILMHCQTTLKYAIKTGIVSSKIIKLFFRL

SEQ ID NO: 2687 - protein, 349 aa, Homo sapiens
MGEPRESLAPAAPADPGPASPRGGTAVILDIFRRADKNDDGKLSLEEFQLFFADGVLNEKELEDLFHTIDSDNTNHVDTKELCDYFVDHMGDYEDVLASLETLNHSVLKAMGYTKKVYEGGSNVDQFVTRFLLKETANQIQSLLSSVESAVEAIEEQTSQLRQNHIKPSHSAAQTWCGSPTPASAPNHKLMAMEQGKTLPSATEDAKEEGLEAQISRLAELIGRLESKALWFDLQQRLSDEDGTNMHLQLVRQEMAVCPEQLSEFLDSLRQYLRGTTGVRNCFHITAVRLSDGFTFVIYEFWETEEAWKRHLQSPLCKAFRHVKVDTLSQPEALSRILVPAAWCTVGRD

SEQ ID NO: 2688 - protein, 114 aa, Homo sapiens
MDASIKPGCYSLGLSERPLESPGRSRCLGQKMSLKLPSPLSPQDVLESKNSTIKDLQYELAQVCKAHNDLLRTYEAKLLAFGIPLDNVGFKPLETAVIGQTLGQGPAGLVGTPT

SEQ ID NO: 2689 - protein, 292 aa, Homo sapiens
MNIHRALADILRQQGPIPIAHCERETISAIDTSPKENTPVRSSSKNHYTPVRTAKQTPEKPRMNNILTSATEPYDLSFSRSFQNLAHLPPSYESAVKTNPSKYSSLKRLTDKEADEYYMRRRHLPDLAARGTLPLNVIQMSQQKPLPRERPRRPIRAMSQDRVLSPDRGLPDEFSMPYDRILSDEQLLSTERLHSQDPLLSPERTAFPEQSLSRAISHTDVFVSTPVLDRYRMSKMHSHPSASNNSYATLGQSQTAAKRHAFASRRHNTVEQLHYIPGHHTCYTASKTEVTV

SEQ ID NO: 2690 - protein, 453 aa, Homo sapiens
MGSVLGLCSMASWIPCLCGSAPCLLCRCCPSGNNSTVTRLIYALFLLVGVCVACVMLIPGMEEQLNKIPGFCENEKGVVPCNILVGYKAVYRLCFGLAMFYLLLSLLMIKVKSSSDPRAAVHNGFWFFKFAAAIAIIIGAFFIPEGTFTTVWFYVGMAGAFCFILIQLVLLIDFAHSWNESWVEKMEEGNSRCWYAALLSATALNYLLSLVAIVLFFVYYTHPASCSENKAFISVNMLLCVGASVMSILPKIQESQPRSGLLQSSVITVYTMYLTWSAMTNEPETNCNPSLLSIIGYNTTSTVPKEGQSVQWWHAQGIIGLILFLLCVFYSSIRTSNNSQVNKLTLTSDESTLIEDGGARSDGSLEDGDDVHRAVDNERDGVTYSYSFFHFMLFLASLYIMMTLTNWYRYEPSREMKSQWTAVWVKISSSWIGIVLYVWTLVAPLVLTNRDFD

SEQ ID NO: 2691 - protein, 156 aa, Homo sapiens
MGPGLRLVTGGGCRRGPREGGAGARREATPTAAPGGARPAAAGRGGAAAAAAPGHHRSLRGDVTAAGPPAPGAGWWRERLSQTWSAPPAGCLRQRRLSKGCWRWSCGALTIPEQNTLTSLPPQGRWLDSEQLPSVKGPVFTGSGWYLALSLEWQLC

SEQ ID NO: 2692 - protein, 143 aa, Homo sapiens [sequence omitted]

SEQ ID NO: 2693 - protein, 111 aa, Homo sapiens
MISAHCNLHFLGSSDSPTSTYQVAGITGARHHAQLILVVLVEMGFHHVGQAGLELLTSSDPPRLGLPKCWDYRCEPLCPDLHFVCIHLYSLNLLQGLFIHVCLLFRLSIVA

SEQ ID NO: 2694 - protein, 185 aa, Homo sapiens
MTKYKPESEELTAERITEFCHRFLEGKIKPHLMSQELPEDWDKQPVKVLVGKNFEDVAFDEKKNVFVEFYAPWCGHCKQLAPIWDKLGETYKDHENIVIAKMDSTANEVEAVKVHSFPTLKFFPASADRTVIDYNGERTLDGFKKFLESGGQDGAGDDDDLEDLEEAEEPDMEEDDDQKAVKDEL

SEQ ID NO: 2695 - protein, 462 aa, Homo sapiens
MGKEKTHINIVVIGHVDSGKSTTTGHLIYKCGGIDKRTIEKFEKEAAEMGKGSFKYAWVLDKLKAERERGITIDISLWKFETSKYYVTIIDAPGHRDFIKNMITGTSQADCAVLIVAAGVGEFEAGISKNGQTREHALLAYTLGVKQLIVGVNKMDSTEPPYSQKRYEEIVKEVSTYIKKIGYNPDTVAFVPISGWNGDNMLEPSANMPWFKGWKVTRKDGNASGTTLLEALDCILPPTRPTDKPLRLPLQDVYKIGGIGTVPVGRVETGVLKPGMVVTFAPVNVTTEVKSVEMHHEALSEALPGDNVGFNVKNVSVKDVRRGNVAGDSKNDPPMEAAGFTAQVIILNHPGQISAGYAPVLDCHTAHIACKFAELKEKIDRRSGKKLEDGPKFLKSGDAAIVDMVPGKPMCVESFSDYPPLGRFAVRDMRQTVAVGVIKAVDKKAAGAGKVTKSAQKAQKAK

SEQ ID NO: 2696 - protein, 176 aa, Homo sapiens [sequence omitted]

SEQ ID NO: 2697 - protein, 118 aa, Homo sapiens [sequence omitted]

SEQ ID NO: 2698 - protein, 113 aa, Homo sapiens
MELSESVQKGFQMLADPRSFDSNAFTLLLRAAFQSLLDAQADEAVLDHPDLKHIDPVVLKHCHAAAATYILEAGKHRADKSTLSTYLEDCKFDRERIELFCTEYQVTYFKIFN

SEQ ID NO: 2699 - protein, 431 aa, Homo sapiens [sequence omitted]

SEQ ID NO: 2700 - protein, 144 aa, Homo sapiens [sequence omitted]

SEQ ID NO: 2701 - protein, 131 aa, Homo sapiens
MEEAGLCGLREKADMLCNSESHDILQHQDSNCSATSNKHLLEDEEGRDFITKNRSWVSPVHCTQESRRELPEQEVAPPSGQQALQCNRNKEKVLERQGLSLSPRLGRGGTFMGHGSLKLPELVILSLQTLE

SEQ ID NO: 2702 - protein, 108 aa, Homo sapiens [sequence omitted]

SEQ ID NO: 2703 - protein, 167 aa, Homo sapiens [sequence omitted]

SEQ ID NO: 2704 - protein, 172 aa, Homo sapiens [sequence omitted]

SEQ ID NO: 2705 - protein, 109 aa, Homo sapiens
MTITVLISAAGHMVVVGIDDYLLLLPILYSLCLQQAPQQLMVFFPSGVTKTFIPVGSGSFVVLPGLGCCSFPLTLITGHGNTKRCPNGSPVLHEYSFLPPLWSSRLISS

SEQ ID NO: 2706 - protein, 279 aa, Homo sapiens
MATKRLARQLGLIRRKSIAPANGNLGRSKSKQLFDYLIVIDFESTCWNDGKHHHSQEIIEFPAVLLNTSTGQIDSEFQAYVQPQEHPILSEFCMELTGIKQAQVDEGVPLKICLSQFCKWIHKIQQQKNIIFATGISEPSASEVKLCAFVTWSDWDLGVCLEYECKRKQLLKPVFLNSWIDLRATYKLFYRRKPKGLSGALQEVGIEFSGREHSGLDDSRNTALLAWKMIRDGCVMKITRSLNKVVPKGIHAVPKLSHQQKNNPSLFMKKSLHHLIAPQ

SEQ ID NO: 2707 - protein, 120 aa, Homo sapiens [sequence omitted]

SEQ ID NO: 2708 - protein, 299 aa, Homo sapiens [sequence omitted]

SEQ ID NO: 2709 - protein, 130 aa, Homo sapiens
MLEKLYVYIYMFMYIFIFIYIFIYIYIYVYVYIYLYIYFYIFTYIYLYIFIYIYICLYIYLYIYLYIFTYIYIYLHIFIYLHIFIYICICLYIFIYVFIYINIYMRGLQNIHGNIELKATNKKYKFYFSE

SEQ ID NO: 2710 - protein, 719 aa, Homo sapiens
MASSSGRVTIQLVDEEAGVGAGRLQLFRGQSYEAIRAACLDSGILFRDPYFPAGPDALGYDQLGPDSEKAKGVKWMRPHEFCAEPKFICEDMSRTDVCQGSLGNCWFLAAAASLTLYPRLLRRVVPPGQDFQHGYAGVFHFQLWQFGRWMDVVVDDRLPVREGKLMFVRSEQRNEFWAPLLEKAYAKLHGSYEVMRGGHMNEAFVDFTGGVGEVLYLRQNSMGLFSALRHALAKESLVGATALSDRGEYRTEEGLVKGHAYSITGTHKVFLGFTKVRLLRLRNPWGCVEWTGAWSDSCPRWDTLPTECRDALLVKKEDGEFWMELRDFLLHFDTVQICSLSPEVLGPSPEGGGWHVHTFQGRWVRGFNSGGSQPNAETFWTNPQFRLTLLEPDEEDDEDEEGPWGGWGAAGARGPARGGRTPKCTVLLSLIQRNRRRLRAKGLTYLTVGFHVFQIPEELLGLWDSPRSHALLPRLLRADRSPLSARRDVTRRCCLRPGHYLVVPSTAHAGDEADFTLRVFSERRHTAVEIDDVISADLQSLQGPYLPLELGLEQLFQELAGEEEELNASQLQALLSIALEPARAHTSTPREIGLRTCEQLLQCFGHGQSLALHHFQQLWGYLLEWQAIFNKFDEDTSGTMNSYELRLALNAAGFHLNNQLTQTLTSRYRDSRLRVDFERFVSCVAHLTCIFCHCSQHLDGGEGVICLTHRQWMEVATFS

SEQ ID NO: 2711 - protein, 198 aa, Homo sapiens
MGYKVVPLCMRLFWRRLITQQISVGHLGLSDPFYEAMVKSHSVAQAGVQWHDLGSLQPPPPRFKRSFCFSLSSGWYYRNTPPCLANASLSINEDVRPCKLQESRDLVCLGHRDISAADPVLEAYNLESPQLSSWNHHQAPSVGFLWRLKVSTWQHKVVIKDSGVTAQAQIPAANCEVFEEKLRPIKLNGSSQIKWPDQ

SEQ ID NO: 2712 - protein, 269 aa, Homo sapiens [sequence omitted]

SEQ ID NO: 2713 - protein, 107 aa, Homo sapiens
MPPRAPERAAAGGGKRRGRPQAGARWLSPQPGPARPPEEGGSGRLSGRGSVEGEKGQGKDLLSPRDPAPGQLLPGGVSLKDQRRLERRRRWRRQQRRPALPTSPPPS

SEQ ID NO: 2714 - protein, 252 aa, Homo sapiens [sequence omitted]

SEQ ID NO: 2715 - protein, 123 aa, Homo sapiens [sequence omitted]

SEQ ID NO: 2716 - protein, 112 aa, Homo sapiens [sequence omitted]

SEQ ID NO: 2717 - protein, 179 aa, Homo sapiens [sequence omitted]

SEQ ID NO: 2718 - protein, 476 aa, Homo sapiens [sequence omitted]

SEQ ID NO: 2719 - protein, 118 aa, Homo sapiens
MFESVMGSMEGEMKMCGHLVFSLLSLLSGPLKFSILLKRKIVSCFCEAISSMKTIPFDSVNCPMLSCVLALHSLPAPNCVKQMPAVTLPINHPTGSRAQFKTPKCRNVFTCAFHTVVG

SEQ ID NO: 2720 - protein, 174 aa, Homo sapiens [sequence omitted]

SEQ ID NO: 2721 - protein, 115 aa, Homo sapiens
MGDLGSQALCDFLMNFLLWERWLRELLASPPLPLPPPPASTCSRPDVRRVMCAVVPRPGSLQRQPSSDRRQKRGPPQVSFYFNIIMSLCVLLLSSTSFYSANTNFISHMGRLCAR

SEQ ID NO: 2722 - protein, 306 aa, Homo sapiens
MSTWKARLTKRLKSPSRSMHPFPCSALLACFGNTRESASFNQSGVADTHSTVRVQPVAKAGRQPRHPSAEGAPEKRQDSSTHAERNGSANRNSSHRTAAQPAETPEDVPGSLDDGADCEAVVFHASIPRPSIIDTPKEEEFREEPKCLELEQKMTSDSPPEDIDHKDSYLITRSIMAEPDYIEDDNPELIRPQKLINPVKTSRNHQDLHRELLMNQKRGLAPQNKPELQKVMEKRKRDQVIKQKEEEAQKKKSDLEIELLKRQQKLEQLELEKQKLQEEQENAPEFVKVKGNLRRTGQEVAQAQES

SEQ ID NO: 2723 - protein, 127 aa, Homo sapiens [sequence omitted]

SEQ ID NO: 2724 - protein, 471 aa, Homo sapiens [sequence omitted]

SEQ ID NO: 2725 - protein, 141 aa, Homo sapiens
MTLEPHLDKLPSSQHSSHPVFADDSHIDICPVSASYQHLDSFTVVPNRLLLLDPCLGKWHQLPAASQSPAQPDSFPLPATHTNPVVPVILAALFSPSSCFMLQCLHCGPLLCLEFLLTVHLPPGWYHSGSLCITARVIFSF

SEQ ID NO: 2726 - protein, 304 aa, Homo sapiens
MGTLLISKVREEYPDRIMNTFSVVPSPKVSDTVVEPYNATLSIHQLVENTDETYCIDNEALYDICFRTLKLATPTYGDLNHLVSATMSGVTTSLRFPGQLNADLRKLAVNMVPFPRLHFFMPGFAPLTARGSQQYRALTVPELTQQMFDAKNMMAACDPRHGRYLTVATVFRGRMSMKEVDEQMLAIQSKNSSYFVEWIPNNVKVAVCDIPPRGLKMSSTFIGNSTAIQELFKRISEQFTAMFRRKAFLHWYTGEGMDEMEFTEAESNMNDLVSEYQQYQDATAEEEGEMYEDDEEESEAQGPK

SEQ ID NO: 2727 - protein, 124 aa, Homo sapiens [sequence omitted]

SEQ ID NO: 2728 - protein, 231 aa, Homo sapiens
MREDVPVRVKAKLKLLASTFHKNQEPQPRLTLHRNRRWGARRRPRRAGRGRRWGSLGTDGGLTGRGPGSPPLPPSAGPAPPPGLREAWVGGGGGRVSPAPGAGLTRGPLAPLGRRRHAPRWEPAAAGALLGPMVALGQRDCSRDLDGAGRGAPALFEPRRGREKASEMLACFAWARWRTPVIPKCWDSRREPPRRDPRPLSFKASFFSQVFPVPACSANFLLLLFCFCFCF

SEQ ID NO: 2729 - protein, 130 aa, Homo sapiens
MTTGWGSPESKGGEETDVQKEAGISGDTPSPAALSSLHTLPGSDKPERKPTMQDCPCDGSSRGSISKRLRGPHRGPGPQAKATPVSLPSWEWEESGPALSCLPPWKPSLSTGLLFTRLCLWLVGICPLSD

SEQ ID NO: 2730 - protein, 102 aa, Homo sapiens [sequence omitted]

SEQ ID NO: 2731 - protein, 129 aa, Homo sapiens [sequence omitted]

SEQ ID NO: 2732 - protein, 170 aa, Homo sapiens
MTYTLRVYSRDNEGISSTVITFMTSTAYTNNQADIATQGWFIGLMCAIALLVLILLIVCFIKRSRGGKYPVREKKDVPLGPEDPKEEDGSFDYSDEDNKPLQGSQTSLDGTIKQQESDDSLVDYGEGGEGQFNEDGSFIGQYTVKKDKEETEGNESSEATSPVNAIYSLA

SEQ ID NO: 2733 - protein, 169 aa, Homo sapiens
MAPSEDPRDWRANLKGTIRETGLETSSGGKLAGHQKTVPTAHLTFVIDCTHGKQLSLAATASPPQAPSPNRGLVTPPMKTYIVFCGENWPHLTRVTPMGGGCLAQARATLPLCRGSVASASFPVSPLCPQEVPEAKGKPVKAAPVRSSTWGTVKDSLKALSSCVCGQAD

SEQ ID NO: 2734 - protein, 110 aa, Homo sapiens [sequence omitted]

SEQ ID NO: 2735 - protein, 121 aa, Homo sapiens
MRRLPLPGVWCQPPAWQRNSSPCSPKLLQAFCFPDSEWARCPVGTRLVSPPTGDDVKIQLSLVSPGDDILRLVFLQENRDRSPPTDGVSLCRPGWSVVAQSWLTATSDSRVQEILLHQPPK

SEQ ID NO: 2736 - protein, 459 aa, Homo sapiens [sequence omitted]

SEQ ID NO: 2737 - protein, 147 aa, Homo sapiens [sequence omitted]

SEQ ID NO: 2738 - protein, 443 aa, Homo sapiens
MSSSLSVRRSYSSSSGSLMPSLENLDLSQVAAISNDLKSIRTQEKAQLQDLNDRFASFIERVHELEQQNKVLEAELLVLRQKHSEPSRFRALYEQEIRDLRLAAEDATNEKRIDSLMDEISFLKKVHEEEIAELQAQIQYAQISVEMDVTKPDLSAALKDIRAQYEKLAAKNMQNAEEWFKSRFTVLTESAAKNTDAVRAAKDEVSESRRLLKAKTLEIEACRGMNEALEKQLQELEDKQNADISAMQDTINKLENELRTTKSEMARYLKEYQDLLNVKMALDIEIAAYRKLLEGEETRLSFTSVGSITSGYSQSSQVFGRSAYGGLQTSSYLMSTRSFPSYYTSHVQEEQIEVEETIEAAKAEEAKDEPPSEGEAEEEEKDKEEAEEEEAAEEEEAAREESEEAKEEEEGGEGEEGEETKEAEEEEKKVEGAGEEQAAKKKD

SEQ ID NO: 2739 - protein, 126 aa, Homo sapiens
MQIHHCPGPSSVTLSAWSLLGPCCVGNPEGRWVSSALTPAIPNWAYASPQIRVPAFLDLFMQSLFKPGARINQDHKHKYIHILAYAASVVETWKKVPSVLGICGFFRRQISSSALILFWNFGCKKS

SEQ ID NO: 2740 - protein, 481 aa, Homo sapiens [sequence omitted]

SEQ ID NO: 2741 - protein, 492 aa, Homo sapiens [sequence omitted]

SEQ ID NO: 2742 - protein, 292 aa, Homo sapiens
MQPSREALELRGLPKSVSTVSSTKPPLTTPSSTNPSRQLALEDCVQLRAALDLGYGPECCCHHLPEVAHKSSASAGAPSARLPLQPHSLGTRTKLPPSLCLPGPGRTRLTTEPFPGAPFCSDSCSPALCCVLLTPGRGRGSVAPLGSSQDGRGGCCPTDTVPAAQGMDASWTVAPAQEWLGHPLQSCPQSASRGHLPLPLPTPTTPCISQPPGRRCRPHCGKELFRAPGALHFLPRRHPAAVRHRWTRACPEGPRMHIPQGWLLSSPSLLTDWFSMDSFKPPSLASGQISKT

SEQ ID NO: 2743 - protein, 145 aa, Homo sapiens
MGLKSHVLPAPNSQGQGSLCIFVYVTSYMDYIQLQGKENLDCSGLNKQKIVFPHSMDSGDGWLMVLVQQLHEGRGHVLDPFALISVLVTSWSQDGCCIPKNHVCVQGRRGGGRGRAKLAGPVTFYQKVKPRQKSVSCSLPLHIFT

SEQ ID NO: 2744 - protein, 474 aa, Homo sapiens [sequence omitted]

SEQ ID NO: 2745 - protein, 147 aa, Homo sapiens
MIVSRYGLVGCDAGQVRPKVELSLPAFLALPKKEFKDKPEVEENNLIEEAVWQTSLKIPLPQAQVRERGGGSAGISAAHPSQLCTAGVRPSSALRASRPGWSLQTAALQEPTGADSFLPRSHKTAVDLHSARIPLYIHTKCLLMESV

SEQ ID NO: 2746 - protein, 101 aa, Homo sapiens
MSSRSPPPPPRDPGASIPVPTTHPLHKSCPRVSHPMTSTAGRSHKRECLSSVISHTSLSFPLRGKLSSTEATEAQGETLTVCLWGKAWPQEGLPCWPLQWG

SEQ ID NO: 2747 - protein, 631 aa, Homo sapiens
MHRGKLDCAGGALLSSYLIVLMILLAVVICTVSAIMCVSMRGTICNPGPRKSMSKLLYIRLVLFFPEMVWASLGAAWVADGVQCDRTVVNGIIATVVVSWIIIAATVVSIIIVFDPLGGKMAPYSSAGPSHLDSHDSSQLLNGLKTAATSVWETRIKLLCCCIGKDDHTRVAFSSTAELFSTYFSDTDLVPSDIAAGLALLHQQQDNIRNNQEPAQVVCHAPGSSQEADLDAELENCHHYMQFAAAAYGWPLYIYRNPLTGLCRIGGDCCRSRTTDYDLVGGDQLNCHFGSILHTTGLQYRDFIHVSFHDKVYELPFLVALDHRKESVVVAVRGTMSLQDVLTDLSAESEVLDVECEVQDRLAHKGISQAARYVYQRLINDGILSQAFSIAPEYRLVIVGHSLGGGAAALLATMLRAAYPQVRCYAFSPPRGLWSKALQEYSQSFIVSLVLGKDVIPRLSVTNLEDLKRRILRVVAHCNKPKYKILLHGLWYELFGGNPNNLPTELDGGDQEVLTQPLLGEQSLLTRWSPAYSFSSDSPLDSSPKYPPLYPPGRIIHLQEEGASGRFGCCSAAHYSAKWSHEAEFSKILIGPKMLTDHMPDILMRALDSVVSDRAACVSCPAQGVSSVDVA

SEQ ID NO: 2748 - protein, 120 aa, Homo sapiens [sequence omitted]

SEQ ID NO: 2749 - protein, 110 aa, Homo sapiens
MWIKTSSLPLSICQSVWGRLDAYMQRTRKKSLSLAPLGQRMQTVIHLFIHLFIHLFIHPSIHPSIHPSFHPSIHLSNQPINQPTNQPTNQPTNQPTNQPSNHPTTHIPNQ

SEQ ID NO: 2750 - protein, 221 aa, Homo sapiens
MVCEKDPALKNRCHIRYMHLFSTIKYKVSISVSNALGHNATAITFDEFTIVKPDPPENVVARPVPSNPRRLEVTWQTPSTWPDPESFPLKFFLRYRPLILDQWQHVELSDGTAHTITDAYAGKEYIIQVAAKDNEIGTWSDWSVAAHATPWTEEPRHLTTEAQAAETTTSTTSSLAPPPTTKICDPGELGSGGGPSAPFLVSVPITLALAAAAATASSLLI

SEQ ID NO: 2751 - protein, 121 aa, Homo sapiens
MWSRRGLGVSRAPLHLLLGVWGPSGRTGGQRKGASLARPGRGGLASCSVGANGKRDVLFLRKTLTNTVEDIQIDNFRRKSDLGVGSPDWKNLLIDVTREDHENSQNNSKRRCKVNCETDQR

SEQ ID NO: 2752 - protein, 130 aa, Homo sapiens [sequence omitted]

SEQ ID NO: 2753 - protein, 155 aa, Homo sapiens
MPCPLFPVRFSTEGHEAAFTIRIRHPPNPRLYPPGSLPQGGEAGRGRDILEPALVGSKLGEGSPGRGYLPVPLSQPSLSAPNPVPPISAQYNISALVTIATKTFLRYDRLRALITSIRRFYPTVTVVIADDSDKPERVSGPYVEHYLMPFGKVCS

SEQ ID NO: 2754 - protein, 134 aa, Homo sapiens
MEFRSCCPGWSAMARSWLTATSISQVQGFSCPSLPNSWDYRHVPPRPANFVFLVETGFFHVGQTACELPTSGDMLASAFQSAGITGVNHHGWPIIIIIRDGVLLLLPSLECNGAISAHCKLHLLDPSDSPASAS

SEQ ID NO: 2755 - protein, 124 aa, Homo sapiens
MWEFIYLFIETESHSVTQAGVQWCNLSSLQPPPPWFKQFSCLSFPSSWNYRHLPPCPANFLYFLYFFFFLRWSLSVLPKLEYSGVISAHCNFCLPGSSNSSCLSLPSRWNYRCPLPCLANFCIF

SEQ ID NO: 2756 - protein, 281 aa, Homo sapiens
MGRRNRSLIASGLYGYNATLVGVLMAVFSDKGDYFWWLLLPVCAMSMTCPIFSSALNSMLSKWDLPVFTLPFNMALSMYLSATGHYNPFFPAKLVIPITTAPNISWSDLSALELLKSIPVGVGQIYGCDNPWTGGIFLGAILLSSPLMCLHAAIGSLLGIAAGLSLSAPFEDIYFGLWGFNSSLACIAMGGMFMALTWQTHLLALGCALFTAYLGVGMANFMAEVGLPACTWPFCLATLLFLIMTTKNSNIYKMPLSKVTYPEENRIFYLQAKKRMVESPL

SEQ ID NO: 2757 - protein, 174 aa, Homo sapiens [sequence omitted]

SEQ ID NO: 2758 - protein, 111 aa, Homo sapiens [sequence omitted]

SEQ ID NO: 2759 - protein, 565 aa, Homo sapiens
MDPPDLLSVELSTSRPPQHLGGVKREPPPRPPQPAFFTQKPTYDPVSEDQDPLSSDFKRLGLRKPGLPRGLWLAKPSARVPGTKASRGSGAEVTLIDFGEEPVVPALRPCAPSLAQLAMDACSLLDETPPQSPTRALPRPLHPTPVVDWDARPLPPPPAYDDVAQDEDDFEICSINSTLVGAGVPAGPSQGQTNYAFVPEQARPPPPLEDNLFLPPQGGGKPPSSAQTAEIFQALQQECMRQLQAPAGSPAPSPSPGGDDKPQVPPRVPIPPRPTRPHVQLSPAPPGEEETSQWPGPASPPRVPPREPLSPQGSRTPSPLVPPGSSPLPPRLSSSPGKTMPTTQSFASDPKYATPQVIQAPGPRAGPCILPIVRDGKKVSSTHYYLLPERPSYLERYQRFLREAQSPEEPTPLPVPLLLPPPSTPAPAAPTATVRPMPQAALDPKANFSTNNSNPGARPPPPRATARLPQRGCPGDGPEAGRPADKIQMLQAMVHGVTTEECQAALQCHGWSVQRAAQYLKVEQLFGLGLRPRGECHKVLEMFDWNLEQAGCHLLGSWGPAHHKR

SEQ ID NO: 2760 - protein, 402 aa, Homo sapiens; identical to SEQ ID NO: 2589

SEQ ID NO: 2761 - protein, 745 aa, Homo sapiens [sequence omitted]

SEQ ID NO: 2762 - protein, 238 aa, Homo sapiens
MQGWFNICRSINVTHHINRTKDKNHMIISIDAEKAFNKIQHRFMLKTLNKLGIEGPCLKIIRAICDKRTANIILNGQQLEAFPLKTGTRQGCPLSPLLFNIVLEVLARAIRQVKEIKGIQIGREEVNLSLLADDMILYLENPVVSAQRPLKLINNFSKVSGYRINVQKSLAFLYTSNSKADSQISNELPFTIATKRIKYLGIQLTREVKDLYKENYKPPLKEIGDDTQKNGKTFQAHG

SEQ ID NO: 2763 - protein, 164 aa, Homo sapiens
MREVLTPVRSPQFGAILTTEIERGSPPGQGLGQDIWGCVCPPWKSFQRDHLRGMLPASGGPGTSSPVPFTGIQRSGVYCGASEDRVLGSASIKDDSGCLLRTPAAYLVVHLLGAVEDVDHGAQGSAQVLGRLSLAGPSGAGGGSTHDEMEGLGQGDIAPASDHR

SEQ ID NO: 2764 - protein, 351 aa, Homo sapiens
MKKKDYGFRAGGNGTKKNLQFVGVNGGYETTSSEETSGEDSTPEDLSDSEAEKKCDGPDHKHVKDAHLTCEAGQGIPEGTCHAAQESGPGEEVPHSKAERYKPSEEFLNACRALSQHLPETGTTTDQLLRQSLNTISQEWFRVSSRKSSSPAVVASYLHEVQPHSPHFLKLLVNLADRNGNTALHYSVSHSNFSIAKLLLETGVCNVDHQNKAGYTAVMITPLASAETNEDMAVVWKLLREGNVNIQATQGGQTALMLGVSHDREDMVQALLSCQADVNLQDHDGSSALMLACHHGNVDLVRLLLAHPACDSSLTDKAGRTALSIALKSPTHMEIAGLLRAHAEQGRSLGL

SEQ ID NO: 2765 - protein, 133 aa, Homo sapiens [sequence omitted]

SEQ ID NO: 2766 - protein, 371 aa, Homo sapiens
MHQRIYSGEKHYGCKENGEAFSSGHQLTAPHTFESVEKPYKCEECGKAFSVHGRLTRHQGIHSGKKPYECNKCGKSFRLNSSLKIHQNIHTGEKPYKCKECGKAFSQRAHLAHHNRIHTGYKPFECKECGKSFRCASYLVIHERIHTGEKPYVCQECGKGFSYSHKLTIHRRVHTGEKPYECKECGKAFSVSGQLTQHLSIHSGKRPFECNKCGKSFRFISVLKAHQNIHGAEKPYECKECGKAFRHATSLIYHDRTHAGEKSYECKECGETFSHASHLIIHERIHTSDKPYECKRCGKAFHCASYLVRHESVHADGNPYMCEECGKAFNSSHELSIHHRVHTGEKPFKCNKCRRSFRLRSILEVHQRIHI

SEQ ID NO: 2767 - protein, 479 aa, Homo sapiens
MVSKDTGKCILTTSESEVEPAACLALEMKYALDPNRQIKKRNKALQVRFKDICEAQNEQRDTQLSSGQLGEKREAKPVSCRAAYRKYMTVPARRSIPNVTKSTGVQTSPDLKKCYQTFPLDRKKGNLKSLPAADPFKSQNNGFLTDAKEKNEAGPMEEARPCGAGRVHKTTALVFHSNQHMNTVDQPLGVNCTEPCKSPEPLSYGEAALQNSTRPPSEEPDYQLLGRAKQDRGRPNSEEPAPPALRRVFKTEVATVYAPALSARAPEPGLSDSAAASQWSLCPADDERRRATHLNGLQAPSETALACSPPMQCLSPECSEQPSQTHTPPGLGNQPSPTAVAAGEECQRIVPHTEVVDLKAQLQMMENLISSSQETIKVLLGVIQELEKGEAHREGLSYRTGQDTANCDTCRNSACIIYSVELDFKQQEDKLQPVLRKLHPIEETQVIPSPYSQETYSSTPKQKSKTESKKHGRWKLWFL

SEQ ID NO: 2768 - protein, 346 aa, Homo sapiens
MVLVHVGYLVLPVFGSVRNRGAPFQRSQHPHATSCRHFHLGPPQPQQLAPDFPLAHPVQSQPGLSAHMAPAHQHSGALHQSLTPLPTLQFQDVTGPSFLPQALHQQYLLQQQLLEAQHRRLVSHPRRSQERVSVHPHRLHPSFDFGQLQTPQPRYLAEGTDWDLSVDAGLSPAQFQVRPIPQHYQHYLATPRMHHFPRNSSSTQMVVHEIRNYPYPQLHFLALQGLNPSRHTSAVRESYEELLQLEDRLGNVTRGAVQNTIERFTFPHKYKKRRPQDGKGKKDEGEESDTDEKCTICLSMLEDGEDVRRLPCMHLFHQLCVDQWLAMSKKCPICRVDIETQLGADS

SEQ ID NO: 2769 - protein, 128 aa, Homo sapiens [sequence omitted]

SEQ ID NO: 2770 - protein, 537 aa, Homo sapiens
MDLFDFYEQMDKDEEEEEETQTVSFEVKQEMIEELQKRCIHLEYPLLAEYDFRNDSVNPDINIDLKPTAVLRPYQEKSLRKMFGNGRARSGVIVLPCGAGKSLVGVTAAYTVRKRCLVLGNSAVSVEQWKAQFKMWSTIDDSQICRFTSDAKDKPIGCSVAISTYSMLGHTTKRSWEAERVMEWLKTQEWGLMILDEVHTIPAKMFRRVLTIVQAHCKLGLTATLVREDDKIVDLNFLIGPKLYEANWMELQNNGYIAKVQCAEVWCPMSPEFYREYVAIKTKKRILLYTMNPNKFRACQFLIKFHERRNDKIIVFADNVFALKEYAIRLNKPYIYGPTSQGERMQILQNFKHNPKINTIFISKVGDTSFDLPEANVLIQISSHGGSRRQEAQRLGRVLRAKKGMVAEEYNAFFYSLVSQDTQEMAYSTKRQRFLVDQGYSFKVITKLAGMEEEDLAFSTKEEQQQLLQKVLAATDLDAEEEVVAGEFGSRSSQASRRFGTMSSMSGADDTVYMEYHSSRSKAPSKHVHPLFKRFRK

SEQ ID NO: 2771 - protein, 1184 aa, Homo sapiens
MSHSHPAGLLAAYNSLMDKHLAGYFNNTRIRRHLLRSGLITRSGRILSEKEYKLNMMKRDHQKYIRECLAQAIFHKVLDMERYHQLEIKKKLETLARKERIQRFKGEHTRRSVENNMPILSPHPPVGPKSNRGHSVLVDEGHSSPLALTAPRPYTAPGNMQPPIRLQPLPSNPAVETVPKVTSRSRSKTSLLENEALFPIGGKKAVMKFRNSIGNSQRMNSYQLPNINSYMMPIPPPLPPTGKITRENRSETWRRRRFRPTTAANGLEPLLTKDSRRIHKTSLHSNAAITMIYLGKNVHLSSDNPDFRDEIKVYQQHCGGENLCVYKGKLLEKETFQFISKRHHGFPFSLTFFLNGMQVNRLSSCCEYKHRKGSRLGGKRGYFGFVCVERSSPCYKCIIAMGLDKKPSLPKSRKEKSTEKGEELKKAEGKVRKEREYVIPKRNEIKENKTSVSAKFSAQEIKTGLKEVVTAVEEMTSKGKPGQEVLEDDQENTLKYEYEEDFEVDEEKQGEKSNEEGQADVQMNGIPQSPLDDKKDNLDPEKESETSSQKAPDARDNVKDENDGCSESELEEDKQDMKTASSTSSRSHPYSSDSEDESAVGDREAHTDSSTDESARRSSSQELSENDKPRKSHLPIEESLEIEIEDQEITKADVETKPMPIDESFENVLKEGTEKGTQEIAEGLSEKSGKHVSAEEKEKDKSKLWEESTAQVKDKKAGLPGLEEGGKDSLPLAYVLALGAPTMNFMVDETAAINSNKESQQLVQKTYTLEKKEAMEEDEAPQHRDADIVQGKGEAALWGEAGAVHEAPLRAWKPTAEQPELAEEFTEKREIPPGIERGAEGAAEAEGVRRLGEGGSDPIGQAAAKDAVGLSKDEAPEKQALMLTVLETDKAASEGEQGLEKAVLANEAAALNLEHLHEVAALREAATSEEGEAEGGVAVSDVGESEEEASIDLEDTGPMEDTASKREDGSEEAILGGEEPAKERKEVMRTETRLSPFTGEAEASRMQVSEGSPEEGSLAKEAFLCKEDVEGEEMVTEAEANREDDRKEILPKELDLARERRKAERPKTSLRKTDSEREEVTRANALKDEDAFKEEQKLKAGEGETETEVRAEEETKAPPNEMGSDAENEAPVEASELSDNPGLLGEDSLKETVVPIFEATPGFEKSLENITALRKKKKKKKKKK

SEQ ID NO: 2772 - protein, 170 aa, Homo sapiens
MRLQYALDTHLDGGPLLALAALCSDLVNAGRAPCGRIRLLQPLVQQGLQLAHIFEAQLQGLEPADGGLREHVTIQCAQRQPHVGLREAQLDSSLFELFGELFQLIRGWRLLVGVILAMVLAQFAVIRGLSEHRVQALCRGGSWRWGESPVFQHAAHGEARLRVHVEGLAA

SEQ ID NO: 2773 - protein, 110 aa, Homo sapiens [sequence omitted]

SEQ ID NO: 2774 - protein, 173 aa, Homo sapiens
MSVKSSKLMFLCHGSSRSLHSGSLTSCNTGVCCSLDADKYENDPELEKIRRERNYSWMDIITICKDKLPNYEEKIKMFYEEHLHLDDEIRYILDGSGYFDVRDKEDQWIRIFMEKGDMVTLPAGIYHRFTVDEKNYTKAMRLFVGEPVWTAYNRPADHFEARGQYVKFLAQTA

SEQ ID NO: 2775 - protein, 119 aa, Homo sapiens [sequence omitted]

SEQ ID NO: 2776 - protein, 608 aa, Homo sapiens
MRWSPAPVTSAATDLGVPPLLGGRKPLFHLERPARQGLVPPLSTPPPKQAPHAHGTTPPSVLSHPPPSLSPHVLLSPCHQFQVLHGHTCSHVHIHALGLSLPHCSSLTLMLPVYALPPLGMRDHPPIPITDLADNIERLKANDGLKFSQEYESIDPGQQFTWENSNLEVNKPKNRYANVIAYDHSRVILTSIDGVPGSDYINANYIDGYRKQNAYIATQGPLPETMGDFWRMVWEQRTATVVMMTRLEEKSRVKCDQYWPARGTETCGLIQVTLLDTVELATYTVRTFALHKSGSSEKRELRQFQFMAWPDHGVPEYPTPILAFLRRVKACNPLDAGPMVVHCSAGVGRTGCFIVIDAMLERMKHEKTVDIYGHVTCMRSQRNYMVQTEDQYVFIHEALLEAATCGHTEVPARNLYAHIQKLGQVPPGESVTAMELEFKLLASSKAHTSRFISANLPCNKFKNRLVNIMPYELTRVCLQPIRGVEGSDYINASFLDGYRQQKAYIATQGPLAESTEDFWRMLWEHNSTIIVMLTKLREMGRVSPPFPPGPLSYLGEHQPPLGELPPMLLSPLTPQLLVSMASGARYYYLRHLSQNPVKPGTPPLFLLT

SEQ ID NO: 2777 - protein, 582 aa, Homo sapiens
MLLHLCQHKRIHIRENSYRCEECGKAFIWFSTLTRHRRVHTGEKSYKYECGKSFNQDSNLTTHKRIHTGQKPYKCEECGTSFYQFSYLTRHKLIHTREKPYKCEQYGKTFNQSSTLTGHKIIHNGEKPYKFEECGKAFSIFSTPTKHKIIHTEEKSHRCEEYCKAYKESSHLTTHKRIHTGEKPYKCEECGKAFSIFSTLTKHKIIHTEEKSHRCEECGKAYKESSHLTTHKRIHTGEKPYKCEECGKTFSVFSILTKHKIIHTEEKPYKCEECGKAFKRSSTLTKHRIIHTEEKPYKCEECGKAFNQSSTLSIHKIIHTGEKPYKCEECGKAFKRSSTLTIHKMIHTGEKPYKCEECGKAFNRSSHLTTHKRIHTGHKPYKCKECGKSFSVFSTLTKHKIIHTDKKPYKCEECGKAFNRSSILSIHKKIHTGEKPYKCEECGKAFKRSSHLAGHKQIHSVQKPYKCEECGKAFSIFSTLTKYKIIHTEEKPYKCEKCGKTFYRFSNLNTHKIIHTGEKPCKCEECGKAFNHSSNLIKHKLIHTGDKPYKCEACGKAFRRSSHLSRHKIIHIGIHTEETVQK

SEQ ID NO: 2778 - protein, 142 aa, Homo sapiens
MEGPDHGKALFSTPAAVPELKLLCGADVLKTFQTPNLWKDAHIQEIVEKFGLVCVGRVGHDPKGYIAESPILRMHQHNIHLAKEPVQNEISATYIRRALGQGQSVKYLIPDAVITYIKDHGLYTKGSTWKGKSTQSTEGKTS

SEQ ID NO: 2779 - protein, 306 aa, Homo sapiens
MAHMLQTLLTVDTGLPLAQVQEDSEEAHSASSFFAEISQYTSGSIGCDIPGWYLWVSLKNGITPYLRCAALFFHYLLGVTPPEELHTNSAEGEYSALCSYLSLPTNLFLLFQEYWDTVRPLLQRWCADPALLNCLKQKNTVVRYPRKRNSLIELPDDYSCLLNQASHFRCPRSADDERKHPVLCLFCGAILCSQNICCQEIVNGEEVGACIFHALHCGAGVCIFLKIRECRVVLVEGKARGCAYPAPYLDEYGETDPGLKRGNPLHLSRERYRKLHLVWQQHCIIEEIARSQETNQMLFGFNWQLL

SEQ ID NO: 2780 - protein, 150 aa, Homo sapiens [sequence omitted]

SEQ ID NO: 2781 - protein, 235 aa, Homo sapiens; identical to SEQ ID NO: 2300

SEQ ID NO: 2782 - protein, 1085 aa, Homo sapiens [sequence omitted]

SEQ ID NO: 2783 - protein, 725 aa, Homo sapiens
MDASSDPYLPYDGGGDNIPLRELHKRGTHYTMTNGGSINSSTHLLDLLDEPIPGVGTYDDFHTIDWVREKCKDRERHRRINSKKKESAWEMTKSLYDAWSGWLVVTLTGLASGALAGLIDIAADWMTDLKEGICLSALWYNHEQCCWGSNETTFEERDKCPQWKTWAELIIGQAEGPGSYIMNYIMYIFWALSFAFLAVSLVKVFAPYACGSGIPEIKTILSGFIIRGYLGKWTLMIKTITLVLAVASGLSLGKEGPLVHVACCCGNIFSYLFPKYSTNEAKKREVLSAASAAGVSVAFGAPIGGVLFSLEEVSYYFPLKTLWRSFFAALVAAFVLRSINPFGNSRLVLFYVEYHTPWYLFELFPFILLGVFGGLWGAFFIRANIAWCRRRKSTKFGKYPVLEVIIVAAITAVIAFPNPYTRLNTSELIKELFTDCGPLESSSLCDYRNDMNASKIVDDIPDRPAGIGVYSAIWQLCLALIFKIIMTVFTFGIKVPSGLFIPSMAIGAIAGRIVGIAVEQLAYYHHDWFIFKEWCEVGADCITPGLYAMVGAAACLGGVTRMTVSLVVIVFELTGGLEYIVPLMAAVMTSKWVGDAFGREGIYEAHIRLNGYPFLDAKEEFTHTTLAADVMRPRRNDPPLAVLTQDNMTVDDIENMINETSYNGFPVIMSKESQRLVGFALRRDLTIAIESARKKQEGIVGSSRVCFAQHTPSLPAESPRPLKLR

SEQ ID NO: 2784 - protein, 142 aa, Homo sapiens [sequence omitted]

SEQ ID NO: 2785 - protein, 131 aa, Homo sapiens [sequence omitted]

SEQ ID NO: 2786 - protein, 137 aa, Homo sapiens [sequence omitted]

SEQ ID NO: 2787 - protein, 581 aa, Homo sapiens
MFDFTCMYASENAALVREQNGHQLLVALVGDSLLEPFWPMGTGIARGFLAAMDSAWMVRSWSLGTSPLEVLAERGSIYRLLPQTTPENVSKNFSQYSIDPVTRYPNINVNFLRPSQVRHLYDTGETKDIHLEMESLVNSRTTPKLTRNESVARSSKLLGWCQRQTDGYAGVNVTDLTMSWKSGLALCAIIHRYRPDLIDFDSLDEQNVEKNNQLAFDIAEKELGISPIMTGKEMASVGEPDKLSMVMYLTQFYEMFKDSLPSSDTLDLNAEEKAVLIASTRSPISFLSKLGQTISRKRSPKDKKEKDLDGAGKRRKTSQSEEEEAPRGHRGERPTLVSTLTDRRMDVAVGNQNKVKYMATQLLAKFEENAPAQSIGIRRQGSMKKEFPQNLGGSDTCYFCQKRVYVMERLSAEGKFFHRSCFKCEYCATTLRLSAYAYDIEDGKFYCKPHYCYRLSGYAQRKRPAVAPLSGKEAKGPLQDGATTDANGRANAVASSTERTPGSGVNGLEEPSIAKRLRGTPERIELENYRLSLRQAEALQEVPEETQAEHNLSSVLDTGAEEDVASRSARRAAGHPPATRP

SEQ ID NO: 2788 - protein, 125 aa, Homo sapiens
MSMIAQFSICKMKIKVPAKAFRRNRTRHSQQGKKSQIVGRNLCSEIKPPGLHPALPLRCSFIYLPYPSHHRKTQETRVEMPGTKAAAAIIQTLHTDQSLAPVTGPRQGGASRQGGEWNLPNNGCQ

SEQ ID NO: 2789 - protein, 122 aa, Homo sapiens [sequence omitted]

SEQ ID NO: 2790 - protein, 111 aa, Homo sapiens
MNWSGMKCQFKLLRMAVALICMSMEFGRAVWLRFHPSAYPPCPHPSFVAHLGGVAVGVTLGVVVLRNYEQRLQDQSLWWIFVAMYTVFVLFAVFWNIFAYTLLDLKLPPPP

SEQ ID NO: 2791 - protein, 459 aa, Homo sapiens [sequence omitted]

SEQ ID NO: 2792 - protein, 155 aa, Homo sapiens
MGIRQQLRLPTRTAQPLTSLPCPRKTRAPSRLEAVAAIAGTEPASSSPTMPLPLMAPSEKLLSPPETSRDFRSPPPLPPRLREIPQPQQHRGPERGVPAPRAPCHPPWLSPGRPPRSPDPALHPLALPSPLWGDSGVTGKKVKGAGGGGWGKGFF

SEQ ID NO: 2793 - protein, 201 aa, Homo sapiens
MLRAQEGCEGCVCVCVCVCVLCVSVCVCVCLCVCVCVCVCLCLCVLSVSVCLCVCVSVCLCVCLVSVCLCVCLCVCVSVCLCVCLHLCVCVCGFVCLCLCVCVCLCVCVCLHLCVCVGLCVSVCFCVSVCVCLCVCVCICVFVCVWVCVCLCVCVCLCVCLCLCVFLCVCVFVSVCVSVCVCVCMCIGRTVVPAPQGHQAL

SEQ ID NO: 2794 - protein, 1176 aa, Homo sapiens [sequence omitted]

SEQ ID NO: 2795 - protein, 124 aa, Homo sapiens [sequence omitted]

SEQ ID NO: 2796 - protein, 288 aa, Homo sapiens [sequence omitted]

SEQ ID NO: 2797 - protein, 1375 aa, Homo sapiens [sequence omitted]

SEQ ID NO: 2798 - protein, 147 aa, Homo sapiens [sequence omitted]

SEQ ID NO: 2799 - protein, 159 aa, Homo sapiens
MQFMEEGGCGKVQVAHVPSTYCWILYICAKAALRSLGPRATSWLGAPLSQTGLFFSLALHSSVSLHFSLSPLHHCLSLSLSLSLSLSPRRLTRLTFLFLLWGSSPTSGCMLRPPRSGGFSLLTFSTAPASPALSEPHPATTPICVFLLTKDHCKERRAG

SEQ ID NO: 2800 - protein, 108 aa, Homo sapiens
MPVFASMFGESEQQVSVTVLGKVKSPTALLMWLLLVPISFPVPRTPRVLDSHHSIPQDNINIIRSTVSTVLLLLLKVEGKRVSLHLCIPCSPVFMNKWFDCFEANLSL

SEQ ID NO: 2801 - protein, 107 aa, Homo sapiens
MLHLPTPPAVNLMSSMTPRAWPPRAASLGTVSMLPVYWCLCWETSCSLSPLSLCLLCLFSPRLNIYFHSLPFVVHEHMSLEVKGVANPPSFSASELNVNQVSLKSLL

SEQ ID NO: 2802 - protein, 365 aa, Homo sapiens
MAGPLSSCRLSARPEGGSGRGRRAERVSPSRSNEVISPEILKMRAALFCIFTYLDTRTLLHAAEVCRDWRFVARHPAVWTRVLLENARVCSKFLAMLAQWCTQAHSLTLQNLKPRQRGKKESKEEYARSTRGCLEAGLESLLKAAGGNLLILRISHCPNILTDRSLWLASCYCRALQAVTYRSATDPVGHEVIWALGAGCREIVSLQVAPLHPCQQPTRFSNRCLQMIGRCWPHLRALGVGGAGCGVQGLASLARNCMRLQVLELDHVSEITQEVAAEVCREGLKGLEMLVLTATPVTPKALLHFNSICRNLKSIVVQIGIADYFKEPSSPEAQKLFEDMVTKLQALRRRPGFSKILHIKVEGGC

SEQ ID NO: 2803 - protein, 862 aa, Homo sapiens [sequence omitted]

SEQ ID NO: 2804 - protein, 164 aa, Homo sapiens [sequence omitted]

SEQ ID NO: 2805 - protein, 151 aa, Homo sapiens [sequence omitted]

SEQ ID NO: 2806 - protein, 130 aa, Homo sapiens
MLPMLECSGVIPAYHNLKLLGPSDSPASASRVAGTAGVRHHTWLIFVCFFVEMECRYVAQAGLKLLGSSDPPILGSQSAWIIDMSNCIGPFSSYLTSVSLPHSSIHPSIHPSIHPSFIQTPSGLSQPPQF

SEQ ID NO: 2807 - protein, 530 aa, Homo sapiens
MNSAISVTMRSFKRRFFHLIQLGDGSYNLNFYKDEKISKEPKGSIFLDSCMGVVQNNKVRRFAFELKMQDKSSYLLAADSEVEMEEWITILNKILQLNFEAAMQEKRNGDSHEDDEQSKLEGSGSGLDSYLPELAKSAREAEIKLKSESRVKLFYLDPDAQKLDFSSAEPEVKSFEEKFGKRILVKCNDLSFNLQCCVAENEEGPTTNVEPFFVTLSLFDIKYNRKISADFHVDLNHFSVRQMLATTSPALMNGSGQSPSVLKGILHEAAMQYPKQGIFSVTCPHPDIFLVARIEKVLQGSITHCAEPYMKSSDSSKVAQKVLKNAKQACQRLGQYRMPFAWAARTLFKDASGNLDKNARFSAIYRQDSNKLSNDDMLKLLADFRKPEKMAKLPVILGNLDITIDNVSSDFPNYVNSSYIPTKQFETCSKTPITFEVEEFVPCIPKHTQPYTIYTNHLYVYPKHLKYDSQKSFAKARNIAICIEFKDSDEEDSQPLKCIYGRPGGPVFTRSAFAAVYTITKTQNFMMRLK

SEQ ID NO: 2808 - protein, 168 aa, Homo sapiens
MMDPCSVGVQLRTTNECHKTYYTRHTGFKTLQELSSNDMLLLQLRTGMTLSGNNTICFHHVKIYIDRFEDLQKSCCDPFNIHKKLAKKNLHVIDLDDATFLSAKFGRQLVPGWKLCPKCTQIINGSVDVDTEDRQKRKPESDGRTAKALRSLQFTNPGRQTEFAPETG

SEQ ID NO: 2809 - protein, 211 aa, Homo sapiens
MLDLNSAIQAAKSGGDTAPALPGRTVCTRPPRSPNEVSLEQESEDDARGVRSSLEGHGQHRANTTMHVCWYRNTSVSRADHSAAVENQLSGYLLRKFKNSHGWQKLWVVFTNFCLFFYKTHQDDYPLASLPLLGYSVSIPREADGIHKDYVFKLQFKSHVYFFRAESKYTFERWMEVIQGASSSAGRAPSIVQDGPQPSSGLEGMVRGKEE

SEQ ID NO: 2810 - protein, 172 aa, Homo sapiens [sequence omitted]

SEQ ID NO: 2811 - protein, 931 aa, Homo sapiens [sequence omitted]

SEQ ID NO: 2812 - protein, 123 aa, Homo sapiens [sequence omitted]

SEQ ID NO: 2813 - protein, 760 aa, Homo sapiens
MLFLEAEQGVTHITEDICLDIIRRYELSEEGRQKGFLAIDGFTQYLLSSECDIFDPEQKKVAQDMTQPLSHYYINASHNTYLIEDQFRGPADINGYIRALKMGCRSVELDVSDGSDNEPILCNRNNMTTHVSFRSVIEVINKFAFVASEYPLILCLGNHCSLPQQKVMAQQMKKVFGNKLYTEAPLPSESYLPSPEKLKRMIIVKGKKLPSDPDVLEGEVTDEDEEAEMSRRMSVDYNGEQKQIRLCRELSDLVSICKSVQYRDFELSMKSQNYWEMCSFSETEASRIANEYPEDFVNYNKKFLSRIYPSAMRIDSSNLNPQDFWNCGCQIVAMNFQTPGPMMDLHTGWFLQNGGCGYVLRPSIMRDEVSYFSANTKGILPGVSPLALHIKIISGQNFPKPKGACAKGDVIDPYVCIEIHGIPADCSEQRTKTVQQNSDNPIFDETFEFQVNLPELAMIRFVVLDDDYIGDEFIGQYTIPFECLQPGYRHVPLRSFVGDIMEHVTLFVHIAITNRSGGGKAQKRSLSVRMGKKVREYTMLRNIGLKTIDDIFKIAVHPLREAIDMRENMQNAIVSIKELCGLPPIASLKQCLLTLSSRLITSDNTPSVSLVMRDSFPYLEPLGAIPDVQKKMLTAYDLMIQESRFLIEMADTVQEKIVQCQKAGMEFHEELHNLGAKEGLKGRKLNKATESFAWNITVLKGQGDLLKNAKNEAIENMKQIQLACLSCGLSKAPSSSAEAKSKRSLEAIEEKESSEENGKL

SEQ ID NO: 2814 - protein, 125 aa, Homo sapiens [sequence omitted]

SEQ ID NO: 2815 - protein, 104 aa, Homo sapiens [sequence omitted]

SEQ ID NO: 2816 - protein, 178 aa, Homo sapiens [sequence omitted]

SEQ ID NO: 2817 - protein, 1062 aa, Homo sapiens [sequence omitted]

SEQ ID NO: 2818 - protein, 103 aa, Homo sapiens
MCTSGWLPSPLYHLLLGAGGSRLSLCCGISALGQTCLFSAGKQSPALLLLPTAFAHGLGRALLETPGARSQQRFEPLSLQAWGLGSWQMRYQEALWGRPRLFD

SEQ ID NO: 2819 - protein, 146 aa, Homo sapiens [sequence omitted]

SEQ ID NO: 2820 - protein, 116 aa, Homo sapiens [sequence omitted]

SEQ ID NO: 2821 - protein, 913 aa, Homo sapiens [sequence omitted]

SEQ ID NO: 2822 - protein, 150 aa, Homo sapiens [sequence omitted]

SEQ ID NO: 2823 - protein, 107 aa, Homo sapiens [sequence omitted]

SEQ ID NO: 2824 - protein, 134 aa, Homo sapiens [sequence omitted]

SEQ ID NO: 2825 - protein, 114 aa, Homo sapiens
MYSFFPLTPLFSFLSIKIFMLLPGLLSAPLPDVPPFAHHEKYNTHVYCSFTHNAINTCPFSISCIVPLESNLRSYFSNSSEVFSSRPSPPWKWCGFLRKFSEESTPASGFPHPH

SEQ ID NO: 2826 - protein, 192 aa, Homo sapiens
MKPTWRVHGIIKNGGVKPNIIPSYSELIYYFRAPSMKELQVLTKKAEDCFRAAALASGCTVEIKGGAHDYYNVLPNKSLWKAYMENGRKLGIEFISEDTMLNGPSGSTDFGNVSFVVPGIHPYFHIGSNALNHTEQYTEAAGSQEAQFYTLRTAKALAMTALDVIFKPELLEGIREDFKLKLQEEQFVNAVE

SEQ ID NO: 2827 - protein, 578 aa, Homo sapiens
MADTFTEIMTMMSPSQFLSSSPLRMTNNEDSLSPTSSTLSNLELDAAEKDRKLQEKEKQIEELKRKLEQEQKLVEVLKMQLEVEKRGQQQRPLEAQPSAPGHSVKSDQKHGSLGSSIKDEASLPDCSSSRQPIPVASHAVGQPVSTGGQTLVAKKAVVIKQEVPVGQAEQQSVVSQFYVSSQGQPPPAVVAQPQALLTTQTAQLLLPVSIQGSSVTSVQLPVGSLKLQTSPQAGMQTQPQIATAAQIPTAALASGLAPTVPQTQDTFPQHVLSQPQQVRKVFTNSASSNTVLPYQRHPAPAVQQPFINKASNSVLQSRNAPLPSLQNGPNTPNKPSSPPPPQQFVVQHSLFGSPVAKTKDPPRYEEAIKQTRSTQAPLPEISNAHSQQMDDLFDILIKSGEISLPIKEEPSPISKMRPVTASITTMPVNTVVSRPPPQVQMAPPVSLEPMGSLSASLENQLEAFLDGTLPSANEIPPLQSSSEDREPFSLIEDLQNDLLSHSGMLDHSHSPMETSETQFAAGTPCLSLDLSDSNLDNMEWLDITMPNSSSGLTPLSTTAPSMFSADFLDPQDLPLPWD

SEQ ID NO: 2828 - protein, 117 aa, Homo sapiens
MGDKKSPTRPKRQPKPSSDEGYWDCSVCTFRNSAEAFKCMMCDVRKGTSTRDSKEGGKLVSYSTASLGVRGTLRNRVGGGSSEEKKQAEYLAPGRRRNIVHRGVGPGQRSGPSLKEA

SEQ ID NO: 2829 - protein, 155 aa, Homo sapiens [sequence omitted]

SEQ ID NO: 2830 - protein, 166 aa, Homo sapiens [sequence omitted]

SEQ ID NO: 2831 - protein, 316 aa, Homo sapiens [sequence omitted]

SEQ ID NO: 2832 - protein, 496 aa, Homo sapiens
MSSMEEIQVELQCADLWKRFHDIGTEMIITKAGRRMFPAMRVKITGLDPHQQYYIAMDIVPVDNKRYRYVYHSSKWMVAGNADSPVPPRVYIHPDSLASGDTWMRQVVSFDKLKLTNNELDDQGHIILHSMHKYQPRVHVIRKDFSSDLSPTKPVPVGDGVKTFNFPETVFTTVTAYQNQQITRLKIDRNPFAKGFRDSGRNRTGLEAIMETYAFWRPPVRTLTFEDFTTMQKQQGGSTGTSPTTSSTGTPSPSASSHLLSPSCSPPTFHLAPNTFNVGCRESQLCNLNLSDYPPCARSNMAALQSYPGLSDSGYNRLQSGTTSATQPSETFMPQRTPSLISGIPTPPSLPGNSKMEAYGGQLGSFPTSQFQYVMQAGNAASSSSSPHMFGGSHMQQSSYNAFSLHNPYNLYGYNFPTSPRLAASPEKLSASQSTLLCSSPSNGAFGERQYLPSGMEHSMHMISPSPNNQQATNTCDGRQYGAVPGSSSQMSVHMV

SEQ ID NO: 2833 - protein, 277 aa, Homo sapiens [sequence omitted]

SEQ ID NO: 2834 - protein, 132 aa, Homo sapiens [sequence omitted]

SEQ ID NO: 2835 - protein, 351 aa, Homo sapiens
MRGTLCQGRDPIIQDSWQGECKTCLVSTTFQRRQLPKEGFQNAGPWETGSQSDSSHKPQGASSAPPRTWPHQGAQGNEEDNHSYYVSRLYGPSEPHSRELWVDVAEANRSQVKIHTILSNTHRQASRVVLSFDFPFYGHPLRQITIATGGFIFMGDVIHRMLTATQYVAPLMANFNPGYSDNSTVVYFDNGTVFVVQWDHVYLQGWEDKGSFTFQAALHHDGRIVFAYKEIPMSVPEISSSQHPVKTGLSDAFMILNPSPDVPESRRRSIFEYHRIELDPSKVTSMSAVEFTPLPTCLQHRSCDACMSSDLTFNCSWCHVLQRSLNNQDENTYVNCLDSQQCHGSSESRRP

SEQ ID NO: 2836 - protein, 373 aa, Homo sapiens
MALSRVCWARSAVWGSAVTPGHFVTRRLQLGRSGLAWGAPRSSKLHLSPKADVKNLMSYVVTKTKAINGKYHRFLGRHFPRFYVLYTIFMKGLQMLWADAKKARRIKTNMWKHNIKFHQLPYREMEHLRQVWARGRYPEVHGEFRQDVTKCLFLGIISIPPFANYLVFLLMYLFPRQLLIRHFWTPKQQTDFLDIYHAFRKQSHPEIISYLEKVIPLISDAGLRWRLTDLCTKIQRGTHPAIHDILALRECFSNHPLGMNQLQALHVKALSRAMLLTSYLPPPLLRHRLKTHTTVIHQLDKALAKLGIGQLTAQEVKSACYLRGLNSTHIGEDRCRTWLGEWLQISCSLKEAELSLLLHNVVLLSTNYLGTRR

SEQ ID NO: 2837 - protein, 733 aa, Homo sapiens [sequence omitted]

SEQ ID NO: 2838 - protein, 204 aa, Homo sapiens
MDPKDRKKIQFSVPAPPSQLDPRQVEMIRRRRPTPAMLFRLSEHSSPEEEASPHQRASGEGHHLKSKRPNPCAYTPPSLKAVQRIAESHLQSISNLNENQASEEEDELGELRELGYPREEDEEEEEDDEEEEEEEDSQAEVLKVIRQSAGQKTTCGQGLEGPWERPPPLDESERDGGSEDQVEDPALSEPGEEPQRPSPSEPGT

SEQ ID NO: 2839 - protein, 218 aa, Homo sapiens
MAQEKDCQGIIEDVILLGAPVEGEAKHWEPFRKVVSGRIINGYCRGDWLLSFVYRTSSVQLRVAGLQPVLLQDRRVENVDLTSVVSGHLDYAKQMDAILKAVGIRTKPGWDEKGLLLAPGCLPSEEPRQAAAAASSGETPHQVGQTQGPISGDTSKLAMSTDPSQAQVPVGLDQSEGASLPAAASPERPPICSHGMDPNPLGCPDCACKTQGPSTGLD

SEQ ID NO: 2840 - protein, 264 aa, Homo sapiens
MAFPCRRSLTAKTLACLLVGVSFLVLQRRRLPPVRPHGPGPARGRPPHPALPHRRRLHGRPVRRLFLLGTPGPEDEARAERLAELVALEAREHGDVLQWAFADTFLNLTLKHLHLLDWLAARCPHARFLLSGDDDVFVHTANVVRFLQAQPPGRHLFSGQLMEGSVPIRDSWSKYFVPPQLFPGSAYPVYCSGGGFLLSGLAPSGHEGIRPFGVQLPGAQQSSFDPCMYRELLLVHRFAPYEMLLMWKALHSPALSCDRGHRVS

SEQ ID NO: 2841 - protein, 222 aa, Homo sapiens
MNSTPRNAQAPSHRECFLPSVARTPSVTKVTPAKKITFLKRGDPRFAGVRLAVHQRAFKTFSALMDELSQRVPLSFGVRSVTTPRGLHSLSALEQLEDGGCYLCSDKKPPKTPSGPGRPQERNPTAQQLRDVEGQREAPGTSSSRKSLKTPRRILLIKNMDPRLQQTVVLSHRNTRNLAAFLGKASDLLRFPVKQLYTTSGKKVLPDMKFHQRSAEWRMEVD

SEQ ID NO: 2842 - protein, 224 aa, Homo sapiens
MRVSGVLRLLALIFAIVTTWMFIRSYMSFSMKTIRLPRWLAASPTKEIQVKKYKCGLIKPCPANYFAFKICSGAANVVGPTMCFEDRMIMSPVKNNVGRGLNIALVNGTTGAVLGQKAFDMYSGDVMHLVKFLKEIPGGALVLVASYDDPGTKMNDESRKLFSDLGSSYAKQLGFRDSWVFIGAKDLRGKSPFEQFLKNSPDTNKYEGWPELLEMEGCMPPKPF

SEQ ID NO: 2843 - protein, 401 aa, Homo sapiens [sequence omitted]

SEQ ID NO: 2844 - protein, 589 aa, Homo sapiens
MGQTKSTSSGGGNRKCNQEQSKNQPLDARVDKIKDKKPRKKAMESSSNSDSDSGTSSDTSSEGISSSDSDDLEEDEEEEDQSIEESEDDDSDSESEAQHKSNNQVLLHGISDPKADGQKATEKAQEKRIHQPLPLASESQTHSFQSQQKQPQVLSQQLPFIFQSSQAKEESVNKHTSVIQSTGLVSNVKPLSLVNQAKKETYMKLIVPSPDVLKAGNKNTSEESSLLTSELRSKREQYKQAFPSQLKKQESSKSLKKVIAALSNPKATSSSPAHPKQTLENNHPNPFLTNALLGNHQPNGVIQSVIQEAPLALTTKTKMQSKINENIAAASGTPFSSPVNLSTSGRRTPGNQTPVMPSASPILHSQGKEKAVSNNVNPVKTQHHSHPAKSLVEQFRGTDSDIPSSKDSEDSNEDEEEDDEEEDEEDDEDDESDDSQSESDSNSESDTEGSEEEDDDDKDQDESDSDTEGEKTSMKLNKTTSSVKSPSMSLTGHSTPRNLHIAKAPGSAPAALCSESQSPAFLGTSSSTLTSSPHSGTSKRRRVTDERELRIPLEYGWQRETRIRNFGGRLQGEVAFMLHVERNLGSTLK

SEQ ID NO: 2845 - protein, 357 aa, Homo sapiens
MASVLNVKESKAPERTVVVAGLPVDLFSDQLLAVLVKSHFQDIKNEGGDVEDVIYPTRTKGVAYVIFKEKKVAENVIRQKKHWLARKTRHAELTVSLRVSHFGDKIFSSVNAILDLSVFGKEVTLETLVKDLKKKIPSLSFSPLKPNGRISVEGSFLAVKRLRESLLARACSLLEKDRNFTSEERKWNRQNPQRNLQRSNNSLASVRTLVPETARSGEMLVLDTDVFLYLKHKCGSYESTLKKFHILSQEKVDGEITTICLKSIQVGSQPNNAKHVKELIEEWSHALYLKLRKETFILEGKENREKRMIKRACEQLSSRYLEVLINLYRTHIDIIGSSSDTYLFKKGVMKLIGQKVS

SEQ ID NO: 2846 - protein, 550 aa, Homo sapiens [sequence omitted]

SEQ ID NO: 2847 - protein, 223 aa, Homo sapiens
MSWMFLRDLLSGVNKYSTGTGWIWLAVVFVFRLLVYMVAAEHVWKDEQKEFECNSRQPGCKNVCFDDFFPISQVRLWALQLIMVSTPSLLVVLHVAYHEGREKRHRKKLYVSPGTMDGGLWYAYLISLIVKTGFEIGFLVLFYKLYDGFSVPYLIKCDLKPCPNTVDCFISKPTEKTIFILFLVITSCLCIVLNFIELSFLVLKCFIKCCLQKYLKKPQVLSV

SEQ ID NO: 2848 - protein, 102 aa, Homo sapiens
MRSFKSLIFSSRPHCLPGRDVGTSCSCQAGNRSLSMSTGSALTPRKDCDKHGLTCGSTQPAVSTLLFSRMQHLMFCQEAVELHIEVASVSSHSKMEISLSLF

SEQ ID NO: 2849 - protein, 429 aa, Homo sapiens
MVNVPYTRPVKFKAAHGFKGPYDFDQIKVVQDLSGEHMGAVWTMKFSHCGRLLASAGQDNVVRIWALKNAFDYFNNMRMKYNTEGRVSPSPSQESLSSSKSDTDTGVCSGTDEDPDDKNAPFRQRPFCKYKGHTADLLDLSWSKNYFLLSSSMDKTVRLWHISRRECLCCFQHIDFVTAIAFHPRDDRYFLSGSLDGKLRLWNIPDKKVALWNEVDGQTKLITAANFCQNGKYAVIGTYDGRCIFYDTEHLKYHTQIHVRSTRGRNKVGRKITGIEPLPGENKILVTSNDSRIRLYDLRDLSLSMKYKGYVNSSSQIKASFSHDFTYLVSGSEDKYVYIWSTYHDLSKFTSVRRDRNDFWEGIKAHNAVVTSAIFAPNPSLMLSLDVQSEKSEGNEKSEDAEVLDATPSGAVAHACNPSTLGGRGRRIT

SEQ ID NO: 2850 - protein, 492 aa, Homo sapiens
MATGGGTRSMTSVYGHLLGLQKLNLLDCASYITGLSGATWTMATLYRDPDWSSKNLEPAIFEARRHVVKDKLPSLFPDQLRKFQEELRQRSQEGYRVTFTDFWGLLIETCLGDERNECKLSDQRAPLSCGQNPLPIYLTINVKDDVSNQDFREWFEFSPYEVGLQKYGAFIPSELFGSEFFMGRLVKRIPESRICYMLGLWSSIFSLNLLDAWNLSHTSEEFFHRWTREKVQDIEDEPILPEIPKCDANILETTVVIPGSWLSNSFREILTHRSFVSEFHNFLSGLQLHTNYLQNGQFSRWKDTVLDGFPNQLAESANHLCLLDTAFFVNSSYPPLLRPERKADLIIHLNYCAGSQTKPLKQTCEYCTVQNIPFPKYELPDENENLKEYYLMENPQEPDAPIVTFFPLINDTFRKYKAPGVERSPEELEQGQVDIYGPKTPYATKELTYTEATFDKLVKLSEYNILNNKDTLLQALRLAVEKKKRLKGQCPS

SEQ ID NO: 2851 - protein, 105 aa, Homo sapiens [sequence omitted]

SEQ ID NO: 2852 - protein, 765 aa, Homo sapiens
MDPVATHSCHLLQQLHEQRIQGLLCDCMLVVKGVCFKAHKNVLAAFSQYFRSLFQNSSSQKNDVFHLDVKNVSGIGQILDFMYTSHLDLNQDNIQVMLDTAQCLQVQNVLSLCHTFLKSATVVQPPGMPCNSTLSLQSTLTPDATCVISENYPPHLLQECSADAQQNKTLDESHPHASPSVNRHHSAGEISKQAPDTSDGSCTELPFKQPNYYYKLRNFYSKQYHKHAAGPSQERVVEQPFAFSTSTDLTTVESQPCAVSHSECILESPEHLPSNFLAQPVNDSAPHPESDATCQQPVKQMRLKKAIHLKKLNFLKSQKYAEQVSEPKSDDGLTKRLESASKNTLEKASSQSAEEKESEEVVSCENFNCISETERPEDPAALEDQSQTLQSQRQYACELCGKPFKHPSNLELHKRSHTGEKPFECNICGKHFSQAGNLQTHLRRHSGEEPYICEICGKRFAASGDVQRHIIIHSGEKPHLCDICGRGFSNFSNLKEHKKTHTADKIFTCDECGKSFNMQRKLVKHRIRHTGERPYSCSACGKCFGGSGDLRRHVRTHTGEKPYTCEICNKCFTRSAVLRRHKKMHCKAGDESPDVLEELSQAIETSDLEKSQSSDSFSQDTSVTLMPVSVKLPVHPVENSVAEFDSHSGGSYCKLRSMIQPHGVSDQEKLSLDPGKLAKPQMQQTQPQAYAYSDVDTPAGGEPLQADGMAMIRSSLAALDNHGGDPLGSRASSTTYRNSEGQFFSSMTLWGLAMKTLQNENELDQ

SEQ ID NO: 2853 - protein, 210 aa, Homo sapiens [sequence omitted]

SEQ ID NO: 2854 - protein, 294 aa, Homo sapiens
MQQTKQQRENIQQVSQKEAKHKITSADGHIESSALLKEKQRHRLHKFLCLRVGKPMRKTFVSQASATMQQYAQRDKKHEYWFAVPQERTDHLYAFFIQWSPEIYAEDTGEYTREPGFIVVKKIEESETIEDSSNQAAAREWELTKHLPPRTIGYPWTLVYGTGKHGTSLKTLYRTMTGLDTPVLMVIKDSDGQVFGALASEPLKVSDGFYGTGETFVFTFCPEFEVFKWTGDNMFFIKGDMDSLAFGGGGGEFALWLDGDLYHGRSHSCKTFGNRTLSKKEDFFIQDIEIWAFE

SEQ ID NO: 2855 - protein, 315 aa, Homo sapiens [sequence omitted]

SEQ ID NO: 2856 - protein, 575 aa, Homo sapiens [sequence omitted]

SEQ ID NO: 2857 - protein, 215 aa, Homo sapiens [sequence omitted]

SEQ ID NO: 2858 - protein, 143 aa, Homo sapiens [sequence omitted]

SEQ ID NO: 2859 - protein, 425 aa, Homo sapiens
MDDGTNEYKIIMLNRRYLSFRVIKVNKECVRGLWAGQQQELVFLRNRNPERGSIQNAKQALRNMINSSCDQPIGYPIFVSPLTTSYSDSHEQLKDILGGPISLGNIRNFIVSTWHRLRKGCGAGCNSGGNIEDSDTGGGTSCTGNNATTANNPHSNVTQGSIGNPGQGSGTGLHPPVTSYPPTLGTSHSSHSVQSGLVRQSPARASVASQSSYCYSSRHSSLRMSTTGFVPCRRSSTSQISLRNLPSSIQSRLSMVNQMEPSGQSGLACVQHGLPSSSSSSQSIPACKHHTLVGFLATEGGQSSATDAQPGNTLSPANNSHSRKAEVIYRVQIVDPSQILEGINLSKRKELQWPDEGIRLKAGRNSWKDWSPQEGMEGHVIHRWVPCSRDPGTRSHIDKAVLLVQIDDKYVTVIETGVLELGAEV

SEQ ID NO: 2860 - protein, 753 aa, Homo sapiens
MVVCYTQQGTATGTVPTSVLSYSDYISRPEDHTSVVRFDKDEREKLCRIVIIDDSLYEEEETFHVLLSMPMGGRIGSEFPGAQVTIVPDKDDEPIFYFGDVEYSVDESAGYVEVQVWRTGTDLSKSSSVTVRSRKTDPPSADAGTDYVGISRNLDFAPGVNMQPVRVVILDDLGQPALEGIEKFELVLRMPMNAALGKPSKTTVSINDSVSDLPKMQFKERIYTGSESDGQIVTMIHRTGDVQYRSSVRCYTRQGSAQVMMDFEERPNTDTSIITFLPGETEKPCILELMDDVLYEEVEELRLVLGTPQSNSPFGAAVGEQNETLIRIRDDADKTVIKFGETKFSVTEPKEPGESVVIRIPVIRQGDTSKVSIVRVHTKDGSATSGEDYHPVSEEIEFKEGETQHVVEIEVIFDGVREMREAFTVHLKPDENMIAEMQLTKAIVYIEEMSSMADVTFPSVPQIVSLLMYDDTSKAKESAEPMSGYPVICITACNPKYSDYDKTGSICASENINDTLTRYRWLISAPAGPDGVTSPMREVDFDTFFTSSKMVTLDSIYFQPGSRVQCAARAVNTNGDEGLELMSPIVTISREEGPCQPRVPGVVGAEPFSAKLRYTGPEDADYTNLIKLTVTMPHIDGMLPVISTRELSNFELTLSPDGTRVGNHKCSNLLDYTEVKTHYGFLTDATKNPEIIGETYPYQYSLSIRGSTTLRFYRNLNLEACLWKFVSYYDMSELLADCGGTIGTDGQVQIYNI

SEQ ID NO: 2861 - protein, 115 aa, Homo sapiens
MTNPWALALTPRRRWWPRARPSGQPRPSRGSSLVPAPWRVRVDRCLPFRAVLIANAAQSVVASRHLSRAFTCVHSFALKNSPRSTHRWPRRSPSSHVGPRGDLGGREDGRGAWRS

SEQ ID NO: 2862 - protein, 191 aa, Homo sapiens; identical to SEQ ID NO: 2096

SEQ ID NO: 2863 - protein, 108 aa, Homo sapiens [sequence omitted]

SEQ ID NO: 2864 - protein, 115 aa, Homo sapiens [sequence omitted]

SEQ ID NO: 2865 - protein, 585 aa, Homo sapiens
MSATSVDQRPKGQGNKVSVQNGSIHQKDAVNDDDFEPYLSSQTNQSNSYPPMSDPYMPSYYAPSIGFPYSLGEAAWSTAGDQPMPYLTTYGQMSNGEHHYIPDGVFSQPGALGNTPPFLGQHGFNFFPGNADFSTWGTSGSQGQSTQSSAYSSSYGYPPSSLGRAITDGQAGFGNDTLSKVPGISSIEQGMTGLKIGGDLTAAVTKTVGTALSSSGMTSIATNSVPPVSSAAPKPTSWAAIARKPAKPQPKLKPKGNVGIGGSAVPPPPIKHNMNIGTWDEKGSVVKAPPTQPVLPPQTIIQQPQPLIQPPPLVQSQLPQQQPQPPQPQQQQGPQPQAQPHQVQPQQQQLQNRWVAPRNRGAGFNQNNGAGSENFGLGVVPVSASPSSVEVHPVLEKLKAINNYNPKDFDWNLKNGRVFIIKSYSEDDIHRSIKYSIWCSTEHGNKRLDAAYRSLNGKGPLYLLFSVNGSGHFCGVAEMKSVVDYNAYAGVWSQDKWKGKFEVKWIFVKDVPNNQLRHIRLENNDNKPVTNSRDTQEVPLEKAKQVLKIIATFKHTTSIFDDFAHYEKRQEEEEAMRRERNRNKQ

SEQ ID NO: 2866 - protein, 101 aa, Homo sapiens
MKLLIIVFCYPFNVCRICGNVSTFIPDIGDLCFLFLSFKITLPRGLSVSWICFKDPAFGFIGFSVLDFINFRSFLYPSFCLLWGLLGSSFTIKKILINLTP

SEQ ID NO: 2867 - protein, 589 aa, Homo sapiens
MQIEVTAWIGPETESENEFRPLDERIDEFHPKATRTLFIGNLEKTTTYHDLRNIFQRFGEIVDIDIKKVNGVPQYAFLQYCDIASVCKAIKKMDGEYLGNNRLKLGFGKSMPTNCVWLDGLSSNVSDQYLTRHFCRYGPVVKVVFDRLKGMALVLYNEIEYAQAAVKETKGRKIGGNKIKVDFANRESQLAFYHCMEKSGQDIRDFYEMLAERREERRASYDYNQDRTYYESVRTPGTYPEDSRRDYPARGREFYSEWETYQGDYYESRYYDDPREYRDYRNDPYEQDIREYSYRQRERERERERFESDRDRDHERRPIERSQSPVHLRRPQSPGASPSQAERLPSDSERRLYSRSSDRSGSCSSLSPPGYEKLDKSRLERYTKNEKTDKERTFDPERVERERRLIRKEKVEKDKTDKQKRKGKVHSPSSQSSETDQENEREQSPEKPRSCNKLSREKADKEGIAKNRLELMPCVVLTRVKEKEGKVIDHTPVEKLKAKLDNDTVKSSALDQKLQVSQTEPAKSDLSKLESVRMKVPKEKGLSSHVEVVEKEGRLKARKHLKPEQPADGVSAVDLEKLEARKRRFADSN

SEQ ID NO: 2868 - protein, 139 aa, Homo sapiens
MVQREKARDNFEGGCLAELIGSPRDWKCFLAVPDPLLGVQHWLHLWRPQTKDGNSLHRHGDQAWGKHRRQNSLKSPALSGHSIDYHFYPRLRCGMLIGPDKQAVASGLEVLVTSSTKILGQLFPDAAHFLEEASEFKAE

SEQ ID NO: 2869 - protein, 211 aa, Homo sapiens [sequence omitted]

SEQ ID NO: 2870 - protein, 217 aa, Homo sapiens
MPVRTECPPPAGASAASAASLIPPPPINTQQPGVATSLLYSGSKFRGHQKSKGNSYDVEVVLQHVDTGNSYLCGYLKIKGLTEEYPTLTTFFEGEIISKKHPFLTRKWDADEDVDRKHWGKFLAFYQYAKSFNSDDFDYEELKNGDYVFMRWKEQFLVPDHTIKDISGASFAGFYYICFQKSAASIEGYYYHRSSEWYQSLNLTHVPEHSAPIYEFR

SEQ ID NO: 2871 - protein, 980 aa, Homo sapiens [sequence omitted]

SEQ ID NO: 2872 - protein, 161 aa, Homo sapiens
MVLILTSEMGWGTRHCTWRPAPTTFLSSPHCYEEVCGFFPSLSSFSPSPPECSPQLVPAGARVDALDRAGRTPLHLAKSKLNILQEGHAQCLEAVRLEVKQIIHMLREYLERLGQHEQRERLDDLCTRLQMTSTKEQVDEVTDLLASFTSLSLQMQSMEKR

SEQ ID NO: 2873 - protein, 362 aa, Homo sapiens
MTQELSFQKFIEQSDLLGELKYDFNEKDEFRHTETQRPFVFNYYENVLEKNSKRYQALGHLLEQYIYELLEKVCKLEKVYIPPEADKEEPRSFFFMSEKALTNHHSALLILLQDHGVFRAGQWSQQAIIHHGLQHGSQIPCIQMALQAHYDVIVLNPNDNFVEPKVEKEWKGLLTQNIESSSLKMVQGGSFFSLQHPPKCIPKRCSNTPEEHTAYIWDYFISKTEGKDIAFIVHGYGGLVFMDLLVRRRWEVMSKVYAVALIDSEHHVGHQLGSDVQLLAWIKHHCREWVTSPKPLDKPAATVFKKEFPMVSAGTEKYILAPSSSLQSIFKYFKKALKARTTINFSRMPIVTRSSTKRKQSA

SEQ ID NO: 2874 - protein, 518 aa, Homo sapiens
MSESRQTHVTLHDIDPQALDQLVQFAYTAEIVVGEGNVQTLLPAASLLQLNGVRDACCKFLLSQLDPSNCLGIRGFADAHSCSDLLKAAHRYVLQHFVDVAKTEEFMLLPLKQVLELVSSDSLNVPSEEEVYRAVLSWVKHDVDARRQHVPRLMKCVRLPLLSRDFLLGHVDAESLVRHHPDCKDLLIEALKFHLLPEQRGVLGTSRTRPRRCEGAGPVLFAVGGGSLFAIHGDCEAYDTRTDRWHVVASMSTRRARVGVAAVGNRLYAVGGYDGTSDLATVESYDPVTNTWQPEVSMGTRRSCLGVAALHGLLYSAGGYDGASCLNSAERYDPLTGTWTSVAAMSTRRRYVRVATLDGNLYAVGGYDSSSHLATVEKYEPQVNVWSPVASMLSRRSSAGVAVLEGALYVAGGNDGTSCLNSVERYSPKAGAWESVAPMNIRRSTHDLVAMDGWLYAVGGNDGSSSLNSIEKYNPRTNKWVAASCMFTRRSSVGVAVLELLNFPPPSSPTLSVSSTSL

SEQ ID NO: 2875 - protein, 608 aa, Homo sapiens
MPFWPIRCLKRSRRMPRGGAGEREKVPANPEALLLMASSQRDMEDWVQAIRRVIWAPLGGGIFGQRLEETVHHERKYGPRLAPLLVEQCVDFIRERGLTEEGLFRMPGQANLVRDLQDSFDCGEKPLFDSTTDVHTVASLLKLYLRELPEPVVPFARYEDFLSCAQLLTKDEGEGTLELAKQVSNLPQANYNLLRYICKFLDEVQAYSNVNKMSVQNLATVFGPNILRPQVEDPVTIMEGTSLVQHLMTVLIRKHSQLFTAPVPEGPTSPRGGLQCAVGWGSEEVTRDSQGEPGGPGLPAHRTSSLDGAAVAVLSRTAPTGPGSRCSPGKKVQTLPSWKSSFRQPRSLSGSPKGGGSSLEVPIISSGGNWLMNGLSSLRGHRRASSGDRLKDSGSVQRLSTYDNVPAPGLVPGIPSVASMAWSGASSSESSVGGSLSSCTACRASDSSARSSLHTDWALEPSPLPSSSEDPKSLDLDHSMDEAGAGASNSEPSEPDSPTREHARRSEALQGLVTELRAELCRQRTEYERSVKRIEEGSADLRKRMSRLEEELDQEKKKYIMLEIKLRNSERAREDAERRNQLLQREMEEFFSTLGSLTVGAKGARAPK

SEQ ID NO: 2876 - protein, 297 aa, Homo sapiens
MGNVPSAVKHCLSYQQLLREHLWIGDSVAGALDPAQTSLLTNLHCFQPDVSGFSVSLAGTVACIHWETSQLSGLPEFVKIVEVGPRDGLQNEKVIVPTDIKIEFINRLSQTGLSVIEVTSFVSSRWVPQMADHTEVMKGIHQYPGVRYPVLTPNLQGFHHAVAAGATEISVFGAASESFSKKNINCSIEESMGKFEEVVKSARHMNIPARGYVSCALGCPYEGSITPQKVTEVSKRLYGMGCYEISLGDTIGVGTPGSMKRMLESVMKEIPPGALAVHCHDTRTSLSKYPYGPSDGN

SEQ ID NO: 2877 - protein, 103 aa, Homo sapiens [sequence omitted]

SEQ ID NO: 2878 - protein, 131 aa, Homo sapiens
METANGEEPPAGPPVSLHGRRLLRVGGACPTPLPVLQRLPPSALHHTLHRVPRRVCVSPLGQVTRIPPVRTVRRAPSGLLPQRRGGPSWWPPSGVARGGPSWWPPSGVVRGGPSSWPPSGVAEPREALGLP

SEQ ID NO: 2879 - protein, 341 aa, Homo sapiens
MLRSPTFTDAGPRCSCLPVSQTLDSMDTVLMGSLQHCCCLLPKMGDTWAQLPWPGPPHPAMLLISLLLAAGLMHSDAGTSCPVLCTCRNQVVDCSSQRLFSVPPDLPMDTRNLSLAHNRITAVPPGYLTCYMELQVLDLHNNSLMELPRGLFLHAKRLAHLDLSYNNFSHVPADMFQEAHGLVHIDLSHNPWLRRVHPQAFQGLMQLRDLDLSYGGLAFLSLEALEGLPGLVTLQIGGNPWVCGCTMEPLLKWLRNRIQRCTADSQLAECRGPPEVEGAPLFSLTEESFKACHLTLTLDDYLFIAFVGFVVSIASVATNFLLGITANCCHRWSKASEEEEI

SEQ ID NO: 2880 - protein, 549 aa, Homo sapiens [sequence omitted]

SEQ ID NO: 2881 - protein, 529 aa, Homo sapiens [sequence omitted]

SEQ ID NO: 2882 - protein, 320 aa, Homo sapiens
MDFSFSFMQGIMGNTIQQPPQLIDSANIRQEDAFDNNSDIAEDGGQTPYEATLQQGFQYPATTEDLPPQPPPPPSVPQTVIPKKTGSPEIKLKITKTIQNGRELFESSLCGDLLNEVQASEHTKSKHESRKEKRKKSNKHDSSRSEERKSHKIPKLEPEEQNRPNERVDTVSEKPREEPVLKEEAPVQPILSSVPTTEVSTGVKFQVGDLVWSKVGTYPWWPCMVSSDPQLEVHTKINTRGAREYHVQFFSNQPERAWVHEKRVREYKGHKQYEELLAEATKQASNHSEKQKIRKPRPQRERAQWDIGIAHAEKALKMTR

SEQ ID NO: 2883 - protein, 435 aa, Homo sapiens
MTPGLQHPPTVVQRPGMPSGARMPHQGAPMGPPGSPYMGSPTAPARSRSAKRRKMADKILPQRIRELVPESQAYMDLLAFERKLDQTIMRKRVDIQEALKRPMKQKRKLRLYISNTFNPAKPDAEDSDGSIASWELRVEGKLLDDPSKQKRKFSSFFKSLVIELDKDLYGPDNHLVEWHRTPTTQETDGFQVKRPGDLSVRCTLLLMLDYQPPQFKLDPRLARLLGLHTQSRSAIVQALWQYVKTNRLQDSHDKEYINGDKYFQQIFDCPRLKFSEIPQRLTALLLPPDPIVINHVISVDPSDQKKTACYDIDVEVEEPLKGQMSSFLLSTANQQEISALDSKIHETIESINQLKIQRDFMLSFSRDPKGYVQDLLRSQSRDLKVMTDVAGNPEEERRAEFYHQPWSQEAVSRYFYCKIQQRRQELEQSLVVRNT

SEQ ID NO: 2884 - protein, 167 aa, Homo sapiens
MSLVIRNLQRVIPIRRAPLRSKIEIVRRILGVQKFDLGIICVDNKNIQHINRIYRDRNVPTDVLSFPFHEHLKAGEFPQPDFPDDYNLGDIFLGVEYIFHQCKENEDYNDVLTVTATRGLCHLLGFTHGTEAEWQQMFQKEKAVLDELGLRTGTRLQPLTRGLFGGS

SEQ ID NO: 2885 - protein, 143 aa, Homo sapiens [sequence omitted]

SEQ ID NO: 2886 - protein, 142 aa, Homo sapiens [sequence omitted]

SEQ ID NO: 2887 - protein, 104 aa, Homo sapiens [sequence omitted]

SEQ ID NO: 2888 - protein, 479 aa, Homo sapiens [sequence omitted]

SEQ ID NO: 2889 - protein, 102 aa, Homo sapiens [sequence omitted]

SEQ ID NO: 2890 - protein, 415 aa, Homo sapiens
MHTHMHIYTHAYTHMHTDTHTCTHIHSHIHTFTCTHIHRRTYTHRHTHTLMHTNKYIYTHMHIHSHAHRHIHTHICTHAHTLTYTHIHTCTYKRTYIQGHIHTHMHTYTHAHTHAHIHIHVHIHMNIHTHTCTHIYTCTYTVVCTHTHMHIYTHMHTHTCIHIHSDTHLHIYTHTLTCTQTQIHTCTHTHIHIHMPTHTRTYTHMHTHTLTCTQIHIYTHIYMHAHTPIHSHIHTWTHTHAHTYTHAHIHVCTHIHMHIHTYTHMHTHMDTYPHTHIHTCTHMHSHAHINTHTHAHIHMHMHTHTHTHTYTHAHAHIHINTYMHTYTYTHIRTYTHIQMHTLTWTHIHTHTHIHIYVYTHTHMHTPTHIYAHRHTYTYAHSHTYIHMHTHIHTHIHTYIYRHTHTHMPCARTHIP

SEQ ID NO: 2891 - protein, 137 aa, Homo sapiens [sequence omitted]

SEQ ID NO: 2892 - protein, 108 aa, Homo sapiens
MPPKGKSGSGKAGKGGAASGSDSADKKAQGPKGGGNAVKVRHILCEKHGKIMEAMEKLKSGMRFNEVAAQYSEDKARQGIPSLQQHAGHHRDLRSTLISLVSYLQTTP

SEQ ID NO: 2893 - protein, 142 aa, Homo sapiens [sequence omitted]

SEQ ID NO: 2894 - protein, 691 aa, Homo sapiens
MDGCKKELPRLQEPEEDEDCYILNVQSSSDDTSGSSVARRAPKRQASCILNVQSRSGDTSGSSVARRAPKRQASSVVVIDSDSDEECHTHEEKKAKLLEINSDDESPECCHVKPAIQEPPIVISDDDNDDDNGNDLEVPDDNSDDSEAPDDNSDDSEAPDDNSDDSEAPDDNSDDSEAPDDNSDDSDVPDDNSDDSSDDNSDDSSDDNSDDSDVPDDKSDDSDVPDDSSDDSDVPDDSSDDSEAPDDSSDDSEAPDDSSDDSEAPDDSSDDSEAPDDSSDDSEASDDSSDDSEASDDSSDDSEAPDDKSDDSDVPEDKSDDSDVPDDNSDDLEVPVPAEDLCNEGQIASDEEELVEAAAAVSQHDSSDDAGEQDLGENLSKPPSDPEANPEVSERKLPTEEEPAPVVEQSGKRKSKTKTIVEPPRKRQTKTKNIVEPPRKRQTKTKNIVEPLRKRKAKTKNVSVTPGHKKRGPSKKKPGTAKVEKRKTRTPKCKVPGCFLQDLEKSKKYSGKNLKRNKDELVQRIYDLFNRSVCDKKLPEKLRIGWNNKMVKTAGLCSTGEMWYPKWRRFAKIQIGLKVCDSADRIRDTLIHEMCHAASRLIDGIHDSHGDAWKYYARKSNRIHPELPRVTRCHNYKINYKVHYECTGCKTRIGCYTKSLDTSRFICAKCKGSLVMVPLTQKDGTRIVPHV

SEQ ID NO: 2895 - protein, 603 aa, Homo sapiens
MVKLAKAGKNQGDPKKMAPPPKEVEEDSEDEEMSEDEEDDEDDDDDEEDDSEEEAMETTPAKGKKAAKVVPVKAKGAKNGKNAKKEDSDEEEDDDSEEDEEDDEDEDEDEDEIEPAAMKAAAAAPASEDEDDEDDEDDEDDDDDEDDEDDDEDDEEEEEEEEEEPVKEAPGKRKKEMAKQKAAPEAKKQKVEGTEPTTAFNLFVGNLNFNKSAPELKTGISDVFAKNDLAVVDVRIGMTRKFGYVDFESAEDLEKALELTGLKVFGNEIKLEKPKGKDSKKERDARTLLAKNLPYKVTQDELKEVFEDAAEIRLVSKDGNSKGIAYIEFKTEADAEKTFEEKQGTEIDGRSISLYYTGEKGQNQDYRGGKNSTWSGESKTLVLSNLSYSATEETLQEVFEKATFIKVPQNQNGKSKGYAFIEFASFEDAKEALNSCNKREIEGRAIRLELQGPRGSPNARSQPSKTLFVKGLSEDTTEETLKESFDGSVRARIVTDRETGSSKGFGFVDFNSEEDAKAAKEAMEDGEIDGNKVTLDWAKPKGEGGFGGRGGGRGGFGGRGGGRGGRGGFGGRGRGGFGGRGGFRGGRGGGGDHKPQGKKTKFE

SEQ ID NO: 2896 - protein, 110 aa, Homo sapiens
MSQPKRRQPWAAGAWSPRAQGHSALVTVPHLENGCNNKTVHGRWQDQTHRKLCRAGSFCAHTVQQWAPGTWPERSRAMRKGWLLETYTRPSLGGFGWRSLACEVGRATFY

SEQ ID NO: 2897 - protein, 248 aa, Homo sapiens
MAGMMVGGNLYGHLSDRFGRKFVLRWSYLQLAIVGTCAAFAPTILVYCSLRFLAGAATFSIIVNTVLLIVEWITHQFCAMALTLTLCAASIGHITLGSLAFVIRDQCILQLVMSAPCFVFFLFSRWLAESARWLIINNKPEEGLKELRKAAHRNGMKNAEDILTMEVLKSTMKQELEAAQKKHSLCELLRIPNICKRICFLSFVRSAGVCWRSTPDPVCLGITSGGCRTAKTPACSFLWKLHFRGAPA

SEQ ID NO: 2898 - protein, 599 aa, Homo sapiens
MKMADRSGKIIPGQVYIEVEYDYEYEAKDRKIVIKQGERYILVKKTNDDWWQVKPDENSKAFYVPAQYVKEVTRKALMPPVKQVAGLPNNSTKIMQSLHLQRSTENVNKLPELSSFGKPSSSVQGTGLIRDANQNFGPSYNQGQTVNLSLDLTHNNGKFNNDSHSPKVSSQNRTRSFGHFPGPEFLDVEKTSFSQEQSCDSAGEGSERIHQDSESGDELSSSSTEQIRATTPPNQGRPDSPVYANLQELKISQSALPPLPGSPAIQINGEWETHKDSSGRCYYYNRGTQERTWKPPRWTRDASISEGDFQNPGDQELLSSEENYYSTSYSQSDSQCGSPPRGWSEELDERGHTLYTSDYTNEKWLKHVDDQGRQYYYSADGSRSEWELPKYNASSQQQREIIKSRSLDRRLQEPIVLTKWRHSTIVLDTNDKESPTASKPCFPENESSPSSPKHQDTASSPKDQEKYGLLNVTKIAENGKKVRKNWLSSWAVLQGSSLLFTKTQGSSTSWFGSNQSKPEFTVDLKGATIEMASKDKSSKKNVFELKTRQGTELLIQSDNDTVINDWFKVLSSTINNQAVETDEGIEEEIPDSPGIEKHD

SEQ ID NO: 2899 - protein, 773 aa, Homo sapiens
MSYLAAVEEEVEESSVKSDNGDEKAEPSPQSWSSLWKHDKDMEEDRASSSSGTIVQEAYGKISTSDNSMAQILTPDSLNTEQGPECSLRPNQTEEGTTPPIEADTLDSSDAQGGLEPRVEKTRPEPTEVLHACKTQVAELELWLQQANVAVEPETLNADMQQVLEQQLVGCQAMLTEIEHKVAFLLETCKDQGLGDNGATQHEAEALSLKLKTVKCNLEKVQMMLQEKHSEDQHPTILKKSSEPEHQEALQPVNLSELESIVTERPQFSRQKDFQQQQVLELKPMEQKDFIKFIEFNAKKMWPQYCQHDNDTTQESSASNQASSPENDVPDSILSPQGQNGDKWQYLHHELSSKIKLPLPQLVEPQVSTNMGILPSVTMYNFRYPTTEELKTYTTQLEDLRQEASNLQTQENMTEEAYINLDKKLFELFLTLSQCLSSVEEMLEMPRLYREDGSGQQVHYETLALELKKLYLALSDKKGDLLKAMTWPGENTNLLLECFDNLQVCLEHTQAAAVCRSKSLKAGLDYNRSYQNEIKRLYHQLIKSKTSLQQSLNEISGQSVAEQLQKADAYTVELENAESRVAKLRDEGERLHLPYALLQEVYKLEDVLDSMWGMLRARYTELSSPFVTESQQDALLQGMVELVKIGKEKLAHGHLKQTKSKVALQAQIENHKVFFQKLVADMLLIQAYSAKILPSLLQNRETFWAEQVTEVKILEEKSRQCGMKLQSLLQKWEEFDENYASLEKDLNSYIYIALCEFGGRNRGKISGKDFILP

SEQ ID NO: 2900 - protein, 137 aa, Homo sapiens [sequence omitted]

SEQ ID NO: 2901 - protein, 329 aa, Homo sapiens [sequence omitted]

SEQ ID NO: 2902 - protein, 413 aa, Homo sapiens [sequence omitted]

SEQ ID NO: 2903 - protein, 305 aa, Homo sapiens
MDPVTQLYTMTSTLEYKTTKADIQMPFTCSVTYYGPSGQKTIHSEQAVFDIYYLDLSLNPSGEVTRQIGDALPVSCTISASRNATVVWMKDNIRLRSSPSFSSLHYQDAGNYVCETALQEVEGLKKRESLTLIVEGKPQIKMTKKTDPSGLSKTIICHVEGFPKPAIQWTITGSGSVINQTEESPYINGRYYSKIIISPEENVTLTCTAENQLERTVNSLNVSAISIPEHDEADEISDENREKVNDQAKLIVGIVVGLLLAALVAGVVYWLYMKKSKTASKHVNKDLGNMEENKKLEENNHKTEA

SEQ ID NO: 2904 - protein, 237 aa, Homo sapiens
MGLCTLQPLGPPRKSSTSCGTWTASGLPSLGHLPRRLRLAFDFLEPRARGQRGGSGGCQSTRAAERTRPPHPPNAVLLLQPEPSLTWAQGRGCRGHFRSLPAAASRSGSRTLRCASSDRSLREQKQRRAGPDPTPSPAPPPAGPRPSPGSLGPSAPAAPRTARGAYELQGGASQDGPGQAAVGATPTTGPGTGGEGALLGCGSGRTPPTSATWRRRLLPAEVPPGAAAANFPERERL

SEQ ID NO: 2905 - protein, 171 aa, Homo sapiens
MAEKQLRCWGIQAPRAEGKFTGAHCMQGLSGQRCLGLVFRELLAESPVWPNQDAGKNRQVCPWMKPSTIYQPLKQILREELVSLTIMLLLVMMIMMLTIKKIINCFPSFSHIEKITTWQDPRKAMNQPLNHMNLHPAVSSTPVPQRSMAVSQPNLGKPQAFFKIKKDIFFL

SEQ ID NO: 2906 - protein, 211 aa, Homo sapiens
MVAHNQVAADNAVSTAAEPRRRPEPSSSSSSSPAAPARPRPCPAVPAPAPGDTHFRTFRSHADYRRITRASALLDACGFYWGPLSVHGAHERLRAEPVGTFLVRDSRQRNCFFALSVKMASGPTSIRVHFQAGRFHLDGSRESFDCLFELLEHYVAAPRRMLGAPLRQRRVRPLQELCRQRIVATVGRENLARIPLNPVLRDYLSSFPFQI

SEQ ID NO: 2907 - protein, 163 aa, Homo sapiens [sequence omitted]

SEQ ID NO: 2908 - protein, 604 aa, Homo sapiens
MASTDYSTYSQAAAQQGYSAYTAQPTQGYAQTTQAYGQQSYGTYGQPTDVSYTQAQTTATYGQTAYATSYGQPPTGYTTPSYPPTSYSSTQPTSYDQSSYSQQPAATAPTRPQDGNKPTETSQPQSSTGGYNQPSLGYGQSNYSYPQVPGSYPMQPVTAPPSYPPTSYGQQSSYGQQSSYGQQPPTSYPPQTGSYSQAPSQYSQQSSSYGQQSSFRQDHPSSMGVYGQESGGFSGPGENRSMSGPDNRGRGRGGFDRGGMSRGGRGGGRGGMGSAGERGGFNKPGGPMDEGPDLDLGPPVDPDEDSDNSAIYVQGLNDSVTLDDLADFFKQCGVVKMNKRTGQPMIHIYLDKETGKPKGDATVSYEDPPTAKAAVEWFDGKDFQGSKLKVSLARKKPPMNSMRGGLPPREGRGMPPPLRGGPGGPGGPGGPMGRMGGRGGDRGGFPPRGPRGSRGNPSGGGNVQHRAGDLQCPNPGCGNQNFAWRTECNQCKAPKPEGFLPPPFPPPGGDRGRGGPGGMRGGRGGLMDRGGPGGMFRGGRGGDRGGFRGGRGMDRGGFGGGRRGGPGGPPGPLMEQMGGRRGGRGGPGKMDKGEHRQERRDRPY

SEQ ID NO: 2909 - protein, 662 aa, Homo sapiens
MWWILELHIIKIVSSYIIWVSVKEVSLFNYVFLISWAFALPYAKLRCLASSVCTVWTCVIIVCKMLYQLQTIKPENFSVNCSLPNENQTNIPFNELNKSLLYSAPIDPTEWVGLRKSSPLLVYLRNNLLMLAILAFEVTIYRHQEYYRGRNNLTAPVSRTIFHDITRLHLDDGLINCAKYFINYFFYKFGLETCFLMSVNVIGQRMDFYAMIHACWLIAVLYRRRRKAIAEIWPKYCCFLAGIITFQYFICIGIPPAPCRDYPWRFKGASFNDNIIKWLYFPDFIVRPNPVFLVYDFMLLLCASLQRQIFEDENKAAVRIMAGDNVEICMNLDAASFSQHNPVPDFIHCRSYLDMSKVIIFSYLFWFVLTIIFITGTTRISIFCMGYLVACFYFLLFGGDLLLKPIKSILRYWDWLIAYNIFVITMKNILSIGACGYIGTLVHNSCWLIQAFSLACTVKGYQMPAANSPCTLPSGEAGIIWDSICFAFLLLQRRVFMSYYFLHVVADIKASQILASRGAELFQATIVKAVKARIEEEKKSMDQLKRQMDRIKARQQKYKKGKERMLSLTQEPGEGQDMQKLSEEDDEREADKQKAKGKKKQWWRPWVDHASMVRSGDYYLFETDSEEEEEEELKKEDEEPPRRSAFQFVYQAWITDPKTALR

SEQ ID NO: 2910 - protein, 117 aa, Homo sapiens
MRPGRQFIQAAHKLPMHPRQGGADAPQDTLMKALAAHGPGCGRFWFASFPKVKGQVVKLKARQHRRGNCWGLQTPERLWPHPIQIPAPPARPPGSPRLCWCGSRSLPHLGVWPRAPG

SEQ ID NO: 2911 - protein, 556 aa, Homo sapiens [sequence omitted]

SEQ ID NO: 2912 - protein, 116 aa, Homo sapiens [sequence omitted]

SEQ ID NO: 2913 - protein, 457 aa, Homo sapiens [sequence omitted]

SEQ ID NO: 2914 - protein, 466 aa, Homo sapiens
MLSLRQRMMHARFRNPLSRQPARPSYRQGYNGRPNVEGKVLPGSNGKPNGQRIINGPQGTKWVVDLDRGLVLNAEGRYLQDSHGNPLRIKLGGDGRTIVDLEGTPVVSPDGLPLFGQGRHGTPLANAQDKPILSLGGKPLVGLEVIKKTTHPPTTTMQPTTTTTPLPTTTTPRPTTATTRRTTTRRPTTTVRTTTRTTTTTTPKPTTPIPTCPPGTLERHDDDGNLIMSSNGIPECYAEEDEFSGLETDTAVPTEEAYVIYDEDYEFETSRPPTTTEPSTTATTPRVIPEEGAISSFPEEEFDLAGRKRFVAPYVTYLNKDPSAPCSLTDALDHFQVDSLDEIIPNDLKKSDLPPQHAPRNITVVAVEGCHSFVIVDWDKATPGDVVTGYLVYSASYEDFIRNKWSTQASSVTHLPIENLKPNTRYYFKVQAQNPHGYGPISPSVSFVTESDNPLLVVRPPGGEPI

SEQ ID NO: 2915 - protein, 156 aa, Homo sapiens
MHTEDNPGKVEHTEELSSITEVVTTEENIPDVVPGSHLTPIERESSSPLSSNQSEPGSIALNSYHSRNCSESDHSRNGFDTDSSCLESHSSLSDSEFPPNNKGEIKTEGQELITVIKAPTSFGYDKPHVLVDLLVDDSGKESLIGYRPTEDSKEFS

SEQ ID NO: 2916 - protein, 558 aa, Homo sapiens
MDGLVDLTVGAQGHVLLLRSQPVLRVKAIMEFNPREVARNVFECNDQVVKGKEAGEVRVCLHVQKSTRDRLREGQIQSVVTYDLALDSGRPHSRAVFNETKNSTRRQTQVLGLTQTCETLKLQLPNCIEDPVSPIVLRLNFSLVGTPLSAFGNLRPVLAEDAQRLFTALFPFEKNCGNDNICQDDLSITFSFMSLDCLVVGGPREFNVTVTVRNDGEDSYRTQVTFFFPLDLSYRKVSTLQNQRSQRSWRLACESASSTEVSGALKSTSCSINHPIFPENSEVTFNITFDVDSKASLGNKLLLKANVTSENNMPRTNKTEFQLELPVKYAVYMVVTSHGVSTKYLNFTASENTSRVMQHQYQVSNLGQRSLPISLVFLVPVRLNQTVIWDRPQVTFSENLSSTCHTKERLPSHSDFLAELRKAPVVNCSIAVCQRIQCDIPFFGIQEEFNATLKGNLSFDWYIKTSHNHLLIVSTAEILFNDSVFTLLPGQGAFVRSQTETKVEPFEVPNPLPLIVGSSVGGLLLLALITAALYKLGFFKRQYKDMMSEGGPPGAEPQ

SEQ ID NO: 2917 - protein, 339 aa, Homo sapiens
MPLQLLLLLILLGPGNSLQLWDTWADEAEKALGPLLARDRRQATEYEYLDYDFLPETEPPEILRNSTDTTPLTGPGTPESTTVEPADHGAGQHGEPVHGFSSYGDTDHSTSSHGGTDHSTSAHGGTDHSTGSHRGTDNSTDGHGGTDHSTGSHRGTDHSTSSHGSTDHSTHRPGGTDHCTSSHGGTDHCTSSHGSTDHSTSSHGGTDHSNHSHGGTDHCTRSHGGTDHSTHSHGGTDHSTGSHGGPVHRTQCHRGPVHGTYYQKRSVHTLFCVLCYSQGHSHGSQQFVRQLPSGGPRPHLCEAVPAGHPNLGAGGHYLLRVHCGAGGPPLPQGPHVPRA

SEQ ID NO: 2918 - protein, 394 aa, Homo sapiens
MGPATLGAASTPSPSPWRTPTSSSGTQVQGLCGTFTQNQQDDFLTPAGDVETSIAAFASKFQVAGKGRCPSEDSALLSPCTTHSQRHAFAEAACAILHSSVFQECHRLVDKEPFYLRCLAAVCGCDPGSDCLCPVLSAYARRCAQEGASPPWRNQTLCPVMCPGGQEYRECAPACGQHCGKPEDCGELGSCVAGCNCPLGLLWDPEGQCVPPSLCPCQLGARRYAPGSATMKECNRCICQERGLWNCTARHCPSQGHSAPGSLSMPLVPVSSPVTAPAPITPALQAVLMAVSVHQARCCWTSAVCLLTSVPAVTVGSGTCPTPPSRKTATFGRAVTVNGVSVTPPKVYTGPELSLRRAGLFLLLSTHLGLTLLWDGDQAPALPQPLDLCPALAP

SEQ ID NO: 2919 - protein, 371 aa, Homo sapiens
MSHEKSFLVSGDNYPPPNPGYPGGPQPPMPPYAQPPYPGAPYPQPPFQPSPYGQPGYPHGPSPYPQGGYPQGPYPQGGYPQGPYPQEGYPQGPYPQGGYPQGPYPQSPFPPNPYGQPQVFPGQDPDSPQHGNYQEEGPPSYYDNQDFPATNWDDKSIRQAFIRKVFLVLTLQLSVTLSTVSVFTFVAEVKGFVRENVWTYYVSYAVFFISLIVLSCCGDFRRKHPWNLVALSVLTASLSYMVGMIASFYNTEAVIMAVGITTAVCFTVVIFSMQTRYDFTSCMGVLLVSMVVLFIFAILCIFIRNRILEIVYASLGALLFTCFLAVDTQLLLGNKQLSLSPEEYVFAALNLYTDIINIFLYILTIIGRAKE

SEQ ID NO: 2920 - protein, 529 aa, Homo sapiens [sequence omitted]

SEQ ID NO: 2921 - protein, 218 aa, Homo sapiens [sequence omitted]

SEQ ID NO: 2922 - protein, 507 aa, Homo sapiens
MGQPSLTWMLMVVVASWFITTAATDTSEARWCSECHSNATCTEDEAVTTCTCQEGFTGDGLTCVDLRGWYRFVGQGGARMAETCVPVLRCNTAAPMWLNGTHPSSDEGIVSRKACAHWSGHCCLWDASVQVKACAGGYYVYNLTAPPECHLAYCTDPSSVEGTCEECSIDEDCKSNNGRWHCQCKQDFNITDISLLEHRLECGANDMKVSLGKCQLKSLGFDKVFMYLSDSRCSGFNDRDNRDWVSVVTPARDGPCGTVLTRNETHATYSNTLYLADEIIIRDLNIKINFACSYPLDMKVSLKTALQPMVSALNIRVGGTGMFTVRMALFQTPSYTQPYQGSSVTLSTEAFLYVGTMLDGGDLSRFALLMTNCYATPSSNATDPLKYFIIQDRCPHTRDSTIQVVENGESSQGRFSVQMFRFAGNYDLVYLHCEVYLCDTMNEKCKPTCSGTRFRSGSVIDQSRVLNLGPITRKGVQATVSRAFSSLGLLKVWLPLLLSATLTLTFQ

SEQ ID NO: 2923 - protein, 147 aa, Homo sapiens
MVTGPCLTCVSSLIERASPNHPTNKGLTLLPWLECSGPIIAHCSLDFPASVDPPTLISRVAGTAGLLILRFSSASANPETARPIPPLPCPPPRLLHMKTTRMKTFMMIHFHLMNKLQEIIQEERHGGMLESLLSLKVGNPGSCSCSH

SEQ ID NO: 2924 - protein, 235 aa, Homo sapiens
MAREECKALLDGLNKTTACYHHLVLTVGGSADSQNLRQELQKTRQKAQELAVSTCARLTAVLRDRGLAADERAEFERLWVAFSGCLDLLEADMRRALELGAAFPLHAPRRPLVRTGVAGASSGVAARALSTRSLRLEAEGDFDVADLRELEREVLQVGEMIDNMEMKVNVPRWTVQARQAAGAELLSTVSAGPSSVVSLQERGGGCDPRKALAAILFGAVLLAAVALAVCVAKLS

SEQ ID NO: 2925 - protein, 406 aa, Homo sapiens
MLSSAGGAPEGKDDKKDTDVGGGGKGTGGASAEGGPTGLAHGRISCGGGINVDVNQHPDGGPGGKALGSDCGGSSGSSSGSGPSAPTSSSVLGSGLVAPVSPYKPGQTVFPLPPAGMTYPGSLAGAYAGYPPQFLPHGVALDPTKPGSLVGAQLAAAAAGSLGCSKPAGSSPLAGASPPSVMTASLCRDPYCLSYHCASHLAGAAAASASCAHDPAAAAAALKSGYPLVYPTHPLHGVHSSLTAAAAAGATPPSLAGHPLYPYGFMLPNDPLPHICNWVSANGPCDKRFATSEELLSHLRTHTAFPGTDKLLSGYPSSSSLASAAAAAMACHMHIPTSGAPGSPGTLALRSPHHALGLSSRYHPYSKSPLPTPGAPVPVPAATGPYYSPYALYGQRLTTASALGYQ

SEQ ID NO: 2926 - protein, 275 aa, Homo sapiens
MIDAVVTSRSEDDETKEKQVRDKRRKTLVIIEKTYSLLLDVEDYERRYLLSLEEERPALMDDRKHKICSMYDNLRGKLPGQERPSDDHFVQIMCIRKGKRMVARILPFLSTEQAADILMTTARNLPFLIKKDAQDEVLPCLLSPFSLLLYHLPSVSITSLLRQLMNLPQSAATPALSNPHLTAVLQNKFGLSLLLILLSRGEDLQSSDPATESTQNNQWTEVMFMATRELLRIPQAALAKPISIPTNLVSLFSRYVDRQKLNLLETKLQLVQGIR

SEQ ID NO: 2927 - protein, 1042 aa, Homo sapiens
MEAEDLSKAEDRNEDPGSKNEGQLAAVQPDVPHGGQSSSPTALWDMLERKFLEYQQLTHKSPIERQKSLLSLLPLFLKAWEHSVGIICFPSLQRLAEDVSDQLAQQLQKALVGKPAEQARLAAGQLLWWKGDVDQDGYLLLKSVYVLTGTDSETLGRVAESGLPALLLQCLYLFFVFPLDKDELLESDLQVQKMFVQMLLNICSDSQGLEGLLPGSELQSLLIATTCLREHSCCFWKEPTFCVLRAISKAQNLSIIQYLQATDCVRLSLQNLSRLTDTLPAPEVSEAVSLILGFVKDSYPVSSALFLEFENSEGYPLLLKVLLRYDGLTQSEVDPHLEELLGLVVWLTTCGRSELKVFDSITYPQLEGFKFHHEASGVTVKNLQAFQVLQNVFHKASDSVLCIQVLSVIRTMWAWNARNFFLLEWTLQPISQFVEIMPLKPAPVQEHFFQLLEALVFELHYVPHEILRKVQHLIKESPGPSCTLMALQSILSIAGGDPLFTDIFRDSGLLGLLLAQLRKQAKIMRKSGNKVSTPGVQDPERELTCVMLRIVVTLLKGSVRNAVVLKDHGMVPFIKIFLDDECYREASLSILEQLSAINAEEYMSIIVGALCSSTQGELQLKLDLLKSLLRILVTPKGRAAFRVSSGFNGLLSLLSDLEGSLQEPPLQAWGAVSPRQTLELVLYTLCAVSAALHWDPVNGYFFRRNGLFEKLAEDLCLLGCFGALEEEGNLLRSWVDTKARPFADLLGTAFSSSGSLPPRIQSCLQILGFLDSMASGTLHLRGDLKESLRTKQGPVVDVQKGETGSDPQRNFKQWPDLEERMDEGDAAIMHPGVVCIMVRLLPRLYHEDHPQLSEEIQCSLASHIQSLVKSEKNRQVMCEAGLLGTLMASCHRALVTSGSPLHSRLIRIFEKLASQAIEPDVLRQFLGLGIPSSLSATTKILDSSHTHRGNPGCSGSQTAQGLAEGPWPAAPDAGLHPGVTQAPQPLGESQDSTTALQTALSLISMTFPACWKPNIWKDNLAQKPVAGDAAQCNIFPPASSVL

SEQ ID NO: 2928 - protein, 106 aa, Homo sapiens [sequence omitted]

SEQ ID NO: 2929 - protein, 497 aa, Homo sapiens
MGSLEMVPMGAGPPSPGGDPDGYDGGNNSQYPSASGSSGNTPTPPNDEERESNEEPPPPYEDPYWGNGDRHSDYQPLGTQDQSLYLGLQHDGNDGLPPPPYSPRDDSSQHIYEEAGRGSMNPVCLPVIVAPYLFWLAAIAASCFTASVSTVVTATGLALSLLLLAAVASSYAAAQRKLLTPVTVLTAVVTFFAICLTWRIEDPPFNSLLFALLAAAGGLQGIYVLVMLVLLILAYRRRWRRLTVCGGIMFLACVLVLIVDAVLQLSPLLGAVTVVSMTLLLLAFVLWLSSPGGLGTLGAALLTLAAALALLASLILGTLNLTTMFLLMLLWTLVVLLICSSCSSCPLSKILLARLFLYALALLLLASALIAGGSILQTNFKSLSSTEFIPNLFCMLLLIVAGILFILAILTEWGSGNRTYGPVFMCLGGLLTMVAGAVWLTVMSNTLLSAWILTAGFLIFLIGFALFGVIRCCRYCCYYCLTLESEERPPTPYRNTV

SEQ ID NO: 2930 - protein, 470 aa, Homo sapiens
MPTTPVKAKRVSTFQEFESNTSDAWDAGEDDDELLAMAAESLNSEVVMETANRVLRNHSQRQGRPTLQEGPGLQQKPRPEAEPPSPPSGDLRLVKSVSESHTSCPAESASDAAPLQRSQSLPHSATVTLGGTSDPSTLSSSALSEREASRLDKFKQLLAGPNTDLEELRRLSWSGIPKPVRPMTWKLLSGYLPANVDRRPATLQRKQKEYFAFIEHYYDSRNDEVHQDTYRQIHIDIPRMSPEALILQPKVTEIFERILFIWAIRHPASGYVQGINDLVTPFFVVFICEYIEAEEVDTVDVSGVPAEVLCNIEADTYWCMSKLLDGIQDNYTFAQPGIQMKVKMLEELVSRIDEQVHRHLDQHEVRYLQFAFRWMNNLLMREVPLRCTIRLWDTYQSEPDGFSHFHLYVCAAFLVRWRKEILEEKDFQELLLFLQNLPTAHWDDEDISLLLAEAYRLKFAFADAPNHYKK

SEQ ID NO: 2931 - protein, 441 aa, Homo sapiens
MEYTVHVWAQKGNQESKKADTKAQTEIDGPKNLVTDWVTENMATVSWDPVQATIDKYMVRYTSADGETREVLVGKEHSSTVLTGLRPGMEYMVHVWAQKGAQESKKADTKAQTELDPPRNLRPSAVTQSGGILTWTPPSAQIHGYILTYQFPDGTVKEMQLGREDQRFALQGLEQGATYPVSLVAFKGGRRSRNVSTTLSTVGARFPHPSDCSQVQQNSNAASGLYTIYLHGDASRPLQVYCDMETDGGGWIVFQRRNTGQLDFFKRWRSYVEGFGDPMKEFWLGLDKLHNLTTGTPARYEVRVDLQTANESAYAIYDFFQVASSKERYKLTVGKYRGTAGDALTYHNGWKFTTFDRDNDIALSNCALTHHGGWWYKNCHLANPNGRYGETKHSEGVNWEPWKGHEFSIPYVELKIRPHGYSREPVLGRKKRTLRGRLRTF

SEQ ID NO: 2932 - protein, 124 aa, Homo sapiens
MLEVPLGVSVSPRAGHIPKEDFSLPAWRDRRTSPCELILSPPLDVWCVMSCKPVLCLTRGLQLRGWTPSCLFAQCSTSPLHLCLTLCCLFPTFGGFWGPGLAVLGFSHCWLRLASSVVHLHVSF

SEQ ID NO: 2933 - protein, 266 aa, Homo sapiens
MFIPNARSGRGGRVAVRLSQQPPWHLGTVASSVSAYRLPHLTRGLGAREANQVPELTDSFRPPASSLRPPTSSLHPPTSSLRPPTSSLCPATSSPLPSNLLPPPSISSLCPASSSPPPSNLLPPPSNLLPPPSNLLPPPSALLPLPSSVLPPPSTLFPPSTSSLLPPPSSFYPLPSALFFCPPPSTLFPPSSLHPLPSSLYPLPSSLRLIWNRGLGPGLEADPGPGEVKGTAGGRHHDVLKLVAPGAVGRLKAETVTAPAAMEGDD

SEQ ID NO: 2934 - protein, 626 aa, Homo sapiens [sequence omitted]

SEQ ID NO: 2935 - protein, 233 aa, Homo sapiens
MFMYYTEPSGCHEGKVFISLNLTFCVCVSIAAVLPKVQDAQPNSGLLQASVITLYTMFVTWSALSSIPEQKCNPHLPTQLGNETVVAGPEGYETQWWDAPSIVGLIIFLLCTLFISLRSSDHRQVNSLMQTEECPPMLDATQQQQQVAACEGRAFDNEQDGVTYSYSFFHFCLVLASLHVMMTLTNWYKPGETRKMISTWTAVWVKICASWAGLLLYLWTLVAPLLLRNRDFS

SEQ ID NO: 2936 - protein, 102 aa, Homo sapiens [sequence omitted]

SEQ ID NO: 2937 - protein, 232 aa, Homo sapiens [sequence omitted]

SEQ ID NO: 2938 - protein, 106 aa, Homo sapiens
MLFLCPLYYSNYHFNKNWFAHYSLKSVGLFHTAIVTDHFSLHLTYIVNCKQSEPLLTPSWIKYFQMGNCEHLRKVILSVGIRNTHPEELLKICIHVLHPRQVYFQS

SEQ ID NO: 2939 - protein, 571 aa, Homo sapiens [sequence omitted]

SEQ ID NO: 2940 - protein, 155 aa, Homo sapiens
MAAGRARAGSLRQWALTQLARAGTSSSLLGRMLLPLQPATGCPRSPHQLGWAAERRPSGRCEERGFLCSHLLCRHFSRRGPVFPGSPVVAVLLGPGSLFCLLGTPCPWDWTGCVLHTVFLWSHFEFGQISLQGFCFECQLRALSPAESVRCSWVH

SEQ ID NO: 2941 - protein, 408 aa, Homo sapiens
MIICPSRITLKPPNSFHSSYPGAIQGCCETGFKDGDLFMSYRSMFQDVRDAVDWVHYKGSLKEKTVENLEKYVVKDGKLPLLLSRMKEVGKVFLATNSDYKYTDKIMTYLFDFPHGPKPGSSHRPWQSYFDLILVDARKPLFFGEGTVLRQVDTKTGKLKIGTYTGPLQHGIVYSGGSSDTICDLLGAKGKDILYIGDHIFGDILKSKKRQGWRTFLVIPELAQELHVWTDKSSLFEELQSLDIFLAELYKHLDSSSNERPDISSIQRRIKKVTHDMDMCYGMMGSLFRSGSRQTLFASQVMRYADLYAASFINLLYYPFSYLFRAAHVLMPHESTVEHTHVDINEMESPLATRNRTSVDFKDTDYKRHQLTRSISEIKPPNLFPLAPQEITHCHDEDDDEEEEEEEE

SEQ ID NO: 2942 - protein, 115 aa, Homo sapiens [sequence omitted]

SEQ ID NO: 2943 - protein, 160 aa, Homo sapiens
MEPHAGRWGLGDLQPWAPLTPSPARMQALLNLAERLGDAKPRGLTKADIEQLPSYRFNPDSHQSEQTLCVVCFSDFEARQLLRVLPCNHEFHTKCVDKWLKVTLPRSAPGYSSCSDGGMGWPGLFPSLSLSSSRKFWLQRTKSPQVAAQMWWVGAGESNA

SEQ ID NO: 2944 - protein, 127 aa, Homo sapiens [sequence omitted]

SEQ ID NO: 2945 - protein, 227 aa, Homo sapiens
MAANKSKGQSSLALHKVIMVGSGGVGKSALTLQFMNVSKSLAYDKKKYTANKKVEGILEFVEDYEPTKADSYRKKVVLDGEEVQIDILDTAGQEDYAAIRDNYFRSGEGFLLVFSITEHESFTATAEFREQILRVKAEEDKIPLLVVGNKSDLEERRQVPVEEARSKAEEWGVQYVETSAKTRANVDKVFFDLMREIRTKKMSENKDKNGKKSSKNKKSFKERCCLL

SEQ ID NO: 2946 - protein, 101 aa, Homo sapiens
MNWYYGKWKAHFVLRCPISFLNFFFFLFEMESHSITQAGVEGCDLGSLQPLPPGFKWFSCLSLPSSWDYRHVPPCLANFCMFSSDGILPCWPGWSRTPDLR

SEQ ID NO: 2947 - protein, 301 aa, Homo sapiens
MSTEGGFGGTSSSDAQQSLQSFWPRVMEEIRNLTVKDFRVQELPLARIKKIMKLDEDVKMISAEAPVLFAKAAQIFITELTLRAWIHTEDNKRRTLQRNDIAMAITKFDQFDFLIDIVPRDELKPPKRQEEVRQSVTPAEPVQYYFTLAQQPTAVQVQGQQQGQQTTSSTTTIQPGQIIIAQPQQGQTMQVMQQIITNTGEIQQIPVQLNAGQLQYIRLAQPVSGTQVVQGQIQTLATNAQQITQTEVQQGQQQFSQFTDGQQLYQIQQVTMPAGQDLAQPMFIQSANQPSDGQAPQVTGD

SEQ ID NO: 2948 - protein, 128 aa, Homo sapiens [sequence omitted]

SEQ ID NO: 2949 - protein, 473 aa, Homo sapiens
MSSPEPPTEPPEPDNPTWSTQPTYSNLGQIRAHLLPSKACRLRTPGSLSTNPEPLPPPLPKKILTRTQSLPTRRTLHPSSIQVQPPRRPFLGSHSVDKSQAAVGPACLPAELTFGPADAPLGLSLRDLHSPEAVHTALAARQLQGLRTIYARLRARLMGGHPGPCHPGHSFRLLDSSPCAESGDALYYRVVRAHEDAWHILVAKVPKPGADVPHPWGLELQASLSPHFNLQGLCGLVPEGTLPGAPWRGAVALAAEVPERTVAQWLAEACTQPPEEFVWAVALLLLQLSAALKFLEAWGAALVELRPENLLLVAPRGCATTGPPRLLLTDFGRVCLQPPGPPGSPGPHAPQLGSLLRALLSLAAPSTTPLAAGLELLAAQLTRLRPSASRTRGALQALLWGPGPELRGRGAPLGPWLRALGPWLRVRRGLLVLRLAERAAGGEAPSLEDWLCCEYLAEATESSMGQALALLWD

SEQ ID NO: 2950 - protein, 126 aa, Homo sapiens
MSILGIPRVCDSPVLVDKVRQLPLPFRLFPSSSSVTSLCPYHTPCSYQFCWTRPHPSGTPYLLGVTDTPIAAVLWGCWSLHCLIEPWGFALQIHLNYKYQSSPESVLAVERNCLWVSLLCLFSFFP

SEQ ID NO: 2951 - protein, 108 aa, Homo sapiens [sequence omitted]

SEQ ID NO: 2952 - protein, 115 aa, Homo sapiens [sequence omitted]

SEQ ID NO: 2953 - protein, 401 aa, Homo sapiens
MGAIRVANCNLHNQSVGEGISAAIQDFQVRQYIEQLNNCRIGLQPAVLRRAYWLEAGSANLGLITVDIALAADHHSKHEAQRHFLETHDARTKRLWFLWPDDILKNKRCRNKCGCLGGCRFFGGTVTGLDFFKLEELTPSSSSAFSSTSAESDMYYGQSLLQPGEWIITKEIPKIIDGNVNGMKRKEWENKSVGIEVERKTQHLSLQVPLRSHSSSSSSEENSSSSAAQPLLAGEKESPSSVADDHLVQKEFLHGTKRDDGQASIPTEISGNSPVSPNTQDKSVGQSPLRSPLKRQASVCSTRLGSTKSLTAAFYGDKQPVTVGVQFSSDVSRSDENVLDSPKQRRSFGSFPYTPSADSNSFHQYRSMDSSMSMADSEAYFSAAEEFEPISSDEGPGTYPG

SEQ ID NO: 2954 - protein, 109 aa, Homo sapiens
MTGLNFQLCSCLSIIVFVIPLFPPSCLPRELIFLKNFFTNHLYYEAQVCHEVLASPTCVSCRHSVQDIDLGAKEGKLDIILFLRLKAYSLVGESTLLSLPQCFSPSVLP

SEQ ID NO: 2955 - protein, 129 aa, Homo sapiens
MWLWQDIQCCPAPPSVPPRALEPGRAPPPPGEGLGAGIPSLSPPQKKPQSVGICVRQKGRQKAGLEKGNRRKELRQANCPSLRPQRKGADTRRLPRETRPTKKRTAAAQPFLQLWNPAPHTSNGRTGDL

SEQ ID NO: 2956 - protein, 138 aa, Homo sapiens
MSEEEAAQIPRSSVWEQDQQNVVQRVVALPLVRATCTAVCDVYSAAKDRHPLLGSACRLAENCVCGLTTRALDHAQPLLEHLQPQLATMNSLACRGLDKLEEKLPFLQQPSETVPRTTRHGDLQWGQARLEAGGREGW

SEQ ID NO: 2957 - protein, 325 aa, Homo sapiens
MSDLPGVAASRRAASETRIFAAWPPPDTRRQKLGSSWRGRLPSRGVRNSDLRGVATSRHAASETRLFAAWPPPVTRRQKLASSRRGRLPSRGVRNSHLPGVAASRHAASETRIFLVWPPPVTRRQKLGSSRRGRVPSRGVRNSHLPGVAASRHAASETRIFPAWPRPVTQRQKLDIPGVAASRHAASETRSSWRGRLPSRSVRNSIFLAWPPPVTQRQKLGLPAMATSHPAASETRTFLAWPRPLTQRQKLDLPGVATSPPAASETRIVLGWLLLLRNVRNSPAWAPGSEESGLWWQGQALAHCDFLCESLTCILGHKPCRLFWE

SEQ ID NO: 2958 - protein, 417 aa, Homo sapiens
MTKDATKEALHATMDLTKEAVSLTKDAFSLGRDRMTSTMHKMLSLPPAKEPMAKTDEGVAAPVSGGAARLRFFSMKRTVSQQSFDGVSLDSSGPEDRISVDSDGSDSFVMLLESESGPESVPPGSLSNVSDNAGVQGSPLVNNYGQGSPAANSSVSPSGEDLIFHPVSVLVLKVNEVSFGIEVRGEDLTVALQAEELTLQQLGTVGLWQFLHGQCPGTCFQESSTLKTGHIRPAVGLRFEVGPGAAVHSPLASQNGFLHLLLHGCDLELLTSVLSGLGPFLEDEEIPVVVPMQIELLNSSITLKDDIPPIYPTSPGPIPITLAMEHVVLKRSDDGVFHIGAAAQDKPSAEVLKSEKRQPPKEQVFLVPTGEVFEQQVKELPILQKELIETKQALANANHDKEKLLQEIRKYNPFFEL

SEQ ID NO: 2959 - protein, 254 aa, Homo sapiens [sequence omitted]

SEQ ID NO: 2960 - protein, 961 aa, Homo sapiens
MITVVYGPDLVNISHLNLVAFQEEVAKEWTNEVFSLATNLLAQNMSRDAFLEKAYTKLKLQVTPEGRIPLKNIYRLFSADRKRVGTALEACSLPSSRNDSIPQEDFTPEVYRVFLNNLCPRPEIDNIFSEFGAKSKPYLTVDQMMDFINLKQRDPRLNEILYPPLKQEQVQVLIEKYEPNNSLARKGQISVDGFMRYLSGEENGVVSPEKLDLNEDMSQPLSHYFINSSHNTYLTAGQLAGNSSVEMYRQVLLSGCRCVELDCWKGRTAEEEPVITHGFTMTTEISFKEVIEAIAECAFKTSPFPILLSFENHVDSPKQQAKMAEYCRLIFGDALLMEPLEKYPLESGVPLPSPMDLMYKILVKNKKKSHKSSEGSGKKKLSEQASNTYSDSSSMFEPSSPGAGEADTESDDDDDDDDCKKSSMDEGTAGSEAMATEEMSNLVNYIQPVKFESFEISKKRNKSFEMSSFVETKGLEQLTKSPVEFVEYNKMQLSRIYPKGTRVDSSNYMPQLFWNAGCQMVALNFQTMDLAMQINMGMYEYNGKSGYRLKPEFMRRPDKHFDPFTEGIVDGIVANTLSVKIISGQFLSDKKVGTYVEVDMFGLPVDTRRKAFKTKTSQGNAVNPVWEEEPIVFKKVVLPTLACLRIAVYEEGGKFIGHRILPVQAIRPGYHYICLRNERNQPLTLPAVFVYIEVKDYVPDTYADVIEALSNPIRYVNLMEQRAKQLAALTLEDEEEVKKEADPGETPSEAPSEARTTPAENGVNHTTTLTPKPPSQALHSQPAPGSVKAPAKTEDLIQSVLTEVEAQTIEELKQQKSFVKLQKKHYKEMKDLVKRHHKKTTDLIKEHTTKYNEIQNDYLRRRAALEKSAKKDSKKKSEPSSPDHGSSTIEQDLAALDAEMTQKLIDLKDKQQQQLLNLRQEQYYSEKYQKREHIKLLIQKLTDVAEECQNNQLKKLKEICE

SEQ ID NO: 2961 - protein, 270 aa, Homo sapiens
MPRDNMASLIQRIARQACLTFRGSWGGRGASDRDAASGAEAPMQPGFPENLSKLKSLLTQLRAEDLNIAPRKATLQPLPPNLPPVTYMHIYETDGFSLGVFLLKSGTSIPLHDHPGMHGMLKVLYGTVRISCMDKLDAGGGQRPRALPPEQQFEPPLQPREREAVRPGVLRSRAEYTEASGPCILTPHRDNLHQIDAVEGPAAFLDILAPPYDPDDGRDCHYYRVLEPVRPKEASSSACDLPREVWLLETPQADDFWCEGEPYPGPKVFP

SEQ ID NO: 2962 - protein, 136 aa, Homo sapiens
MKFSPAHYLLPLLPALVLSTRQDYEELEKQLKEVFKERSTILRQLTKTSRELDGIKVNLQSLKNDEQSAKTDVQKLLELGQKQREEMKSLQEALQNQLKETSEKAEKHQATINFLKTEVERKSKMIRDLQNEVIQI

SEQ ID NO: 2963 - protein, 127 aa, Homo sapiens [sequence omitted]

SEQ ID NO: 2964 - protein, 606 aa, Homo sapiens
MGNTCRVCYQLEAIKRSNEMSNVMGNTTWTTSGLKSQGRLSVGSNRDREISMSVGLGRSQLDSKGGVVGGTIDVNALEMVAHISEHPNQQPSHKIQITMGSTEARVDYMGSSILMGIFSNADLKLQDEWKVNLYNTLDSSITDKSEIFVHGDLKWDIFQVMISRSTTPDLIKIGMKLQEFFTQQFDTSKRALSTWGPVPYLPPKTMTSNLEKSSQEQLLDAAHHRHWPGVLKVVSGCHISLFQIPLPEDGMQFGGSMSLHGNHMTLACFHGPNFRSKSWALFHLEEPNIAFWTEAQKIWEDGSSDHSTYIVQTLDFHLGHNTMVTKPCGALESPMATITKITRRRHENPPHGVASVKEWFNYVTATRNEELNLLRNVDANNTENSTTVKNSSLLSGFRGGSSYNHETETIFALPRMQLDFKSIHVQEPQEPSLQDASLKPKVECSVVTEFTDHICVTMDAELIMFLHDLVSAYLKEKEKAIFPPRILSTRPGQKSPIIIHDDNSSDKDREDSITYTTVDWRDFMCNTWHLEPTLRLISWTGRKIDPVGVDYILQKLGFHHARTTIPKWLQRGVMDPLDKVLSVLIKKLGTALQDEKEKKGKDKEEH

SEQ ID NO: 2965 - protein, 120 aa, Homo sapiens
MVPWTPRPTRSLRGVPTQGFSLHCAALLSPEFPVCQNPTWSPRPRANATSSMKPATSFAHPWALTLFSQRTGTGTVCPCSSNSGTKRTLAEARPRRAEGCRFQVQVHFEFHSQLPSFSGL

SEQ ID NO: 2966 - protein, 243 aa, Homo sapiens
MSGSPVQKPTLHRSISTKVLLAEGENTPFAEHCRHYEDSYRHLQAEMQSLKDQVQELHRDLTKHHSLIKAEIMGDVLHKSLQLDVQIASEHASLEGMRVVFQEIWEEAYQRVANEQEIYEAQLHDLLQLRQENAYLTTITKQITPYVRSIAKVKERLEPRFQAPVDEQSESLQNTHDDSRNNAASARNNPGSVPEKREKTSEPKGNSWAPNGLSEEPLLKNMDHHRSKQKNGGDVPTWREHPT

SEQ ID NO: 2967 - protein, 382 aa, Homo sapiens
MCQLLERVPDTSSSSSDSDSDSDSSGTSLSEDEAPGEARNGRRPARGSSGEKENRGGRRAVRPGSGGPLLSWPLGPAPPPRPPQLERHVVRPPPRSPEPDTLPLAAGSDHPLPRAAWLRVFQHLGPRELCICMRVCRTWSRWCYDKRLWPRMDLSRRKSLTPPMLSGVVRRQPRALDLSWTGVSKKQLMWLLNRLQGLQELVLSGCSWLSVSALGSAPLPALRLLDLRWIEDVKDSQLRELLLPPPDTKPGQTESRGRLQGVAELRLAGLELTDASLRLLLRHAPQLSALDLSHCAHVGDPSVHLLTAPTSPLRETLVHLNLAGCHRLTDHCLPLFRRCPRLRRLDLRSCRQLSPEACARLAAAGPPGPFRCPEEKLLLKDS

SEQ ID NO: 2968 - protein, 676 aa, Homo sapiens [sequence omitted]

SEQ ID NO: 2969 - protein, 124 aa, Homo sapiens
MESCSVAQAGVLTSPFMWRWTGMAGALSALDNTIEDDADDQLPCGEGRPGWVRGELLGSQGVCKDSKDLFVPTSSSLYGCFCVGLVSGMAISVLLLASDFRKLDFSRPEPCFEKEASLWFVAQH

SEQ ID NO: 2970 - protein, 1366 aa, Homo sapiens
MSPCGRKMGEGRQQQRAPVGKLLLLPGRRDTPHGRSGSSGARTQRSLLWLLVHVWLWAASGSSAQLFNLTLSVDEGLPPDTLVGDIRAGLPAAQQQEGSGFFLSEDSDDSPLLDDFHVHPDTGIIRTARRLDRERRDHYSFVAATLLGAVVQVEIRVNDVNDHSPRFPLDSLQLDVSELSPPGTAFRLPGAHDPDAGLFSTQGYTLVQPSDLPKDPAGPFFQLRYRTPGPLPSPLLPGSSSPLEPLDLVLLRRLDREEAAAHRLQIEAWDGGRPRRTGLLSVELRVLDENDNPPVFEQDEYRAAVREDAQPGAEVCRVRATDRDLGPNGFVRYSVRARQVPGAGSGGGALGDAAYFAVEELSGVVRVWRPLDREAQAWHQLVVEARDGGAEPEVATVRVSIAVLDVNDNRPAIHVLFLTEGGVARVSEGARPGDYVARVSVSDADGDWEKEDEATGELGVGLGDGSISLSLEGGEGDFALLPGGPPGVFFLCVEGPLDRESRDLYELLLVATDAGSPPLSTEETLLLRVADLNDQPPLFSQQHYKASVSEAAAPGTVVMWVSASDADEAGSDHAWLRYTVVQLSAPCNLGSLESKMVHTAECGPSFAIDSESGVISTIRALDREVQEAVELKVVAQDLGEPPLSATCLVSITVDDVNDNEPIFWRQVYNATIAEHAPVGHCFLQVTASDADSGLYGFIEYSLYDGFLSYEAPQAFRIDPHDGQICVSQDIDRERDPATYDLLVEAKDGGGLSAQAFVRVDLEDVNDNHPVFNPSTYVTSISDETQPGTEIINVLATDQDSGIYGTVAYELIPGNVSSLFTIDSTTGIIYLTLPLSHLESTTLLLMVSAQDGGGLTAVINADVTIHIFQTTLAPAEFERPKYTFLVYEDVPEDSPIGTVKAREPLNSSEPIFYRISSGDLGGKFSIHPRLGTIRTRKPLDHETQPVVVLTVQAQLGSAPACSSTEVNITVMDVNDNHPAFLRTSDEIRISQTTPPGTALYLARAEDRDSGRNGLIRYSIASPQPGVFAIDRALGVLFLNGSLGAGEQRELTLTLRAEDQGVHPQAALLVLTVVIEKREHSPSWTFEHLVYQVEVSESLSPMTQMLQTQAHPLGPQRAASPLRYSLEPSVDSAMFGIRPYTGWIYLRRQFDYESTQTYNFRVFAWIPEDGFLQNVSTTVIVRVWDENDNSPTFLHDVLFLKVEESPVPQGVIGKITAIDMDSGKNGQLLYFLLSDGKFFKMNPNTGELINWVALDREHRGHHEMTVLVTDRGSPPRNATMAVYVSVTDINDNRPFFPQCLPGKELHVKVLEGQPVNMLVTTVFAKDPDEGNNAEVTYSVSSARHMPLKGKTAFGKQSCKKQTNKQTKS

SEQ ID NO: 2971 - protein, 913 aa, Homo sapiens
MYELSSPIDQELYLFDTTGKHLYTQSLPTGDYLYNFTYTGDGDITLITDNNGNMVNVRRDSTGMPLWLVVPDGQVYWVTMGTNSALKSVTTQGHELAMMTYHGNSGLLATKSNENGWTTFYEYDSFGRLTNVTFPTGQVSSFRSDTDSSVHVQVETSSKDDVTITTNLSASGAFYTLLQDQVRNSYYIGADGSLRLLLANGMEVALQTEPHLLAGTVNPTVGKRNVTLPIDNGLNLVEWRQRKEQARGQVTVFGRRLRVHNRNLLSLDFDRVTRTEKIYDDHRKFTLRILYDQAGRPSLWSPSSRLNGVNVTYSPGGYIAGIQRGIMSERMEYDQAGRITSRIFADGKTWSYTYLEKSMVLLLHSQRQYIFEFDKNDRLSSVTMPNVARQTLETIRSVGYYRNIYQPPEGNASVIQDFTEDGHLLHTFYLGTGRRVIYKYGKLSKLAETLYDTTKVSFTYDETAGMLKTINLQNEGFTCTIRYRQIGPLIDRQIFRFTEEGMVNARFDYNYDNSFRVTSMQAVINETPLPIDLYRYDDVSGKTEQFGKFGVIYYDINQIITTAVMTHTKHFDAYGRMKEVQYEIFRSLMYWMTVQYDNMGRVVKKELKVGPYANTTRYSYEYDADGQLQTVSINDKPLWRYSYDLNGNLHLLSPGNSARLTPLRYDIRDRITRLGDVQYKMDEDGFLRQRGGDIFEYNSAGLLIKAYNRAGSWSVRYRYDGLGRRVSSKSSHSHHLQFFYADLTNPTKVTHLYNHSSSEITSLYYDLQGHLFAMELSSGDEFYIACDNIGTPLAVFSGTGLMIKQILYTAYGEIYMDTNPNFQIIIGYHGGLYDPLTKLVHMGRRDYDVLAGRWTSPDHELWKHLSSSNVMPFNLYMFKNNNPISNSQDIKCFMTERTKDFLPKTATLLWPHT

SEQ ID NO: 2972 - protein, 1269 aa, Homo sapiens
MAQSSPAPFQVLVSPYGLNGTLTGQAYKMSDPATRKLIEEWQYFYPMVLKKKEESKEEDELGYDDDFPVAVEVIVGGVRMVYPSAFVLISQNDIPVPQSVASAGGHIAVGQQGLGSVKDPSNCGMPLTPPTSPEQAILGESGGMQSAASHLVSQDGGMITMHSPKRSGKIPPKLHNHMVHRVWKECILNRTQSKRSQMSTPTLEEEPASNPATWDFVDPTQRVSCSCSRHKLLKRCAVGPNRPPTVSQPGFSAGPSSSSSLPPPASSKHKTAERQEKGDKLQKRPLIPFHHRPSVAEELCMEQNTPGQKLGLAGIDSSLEVSSSRKYDKQMVVPSRNTSKQMNLNPMDSPHSPISPLPPTLSPQPRGQETESLDPPSVPVNPALYGNGLELQQLSTLDDRTVLVGQRLPLMAEVSETALYCGIRPSNPESSEKWWHSYRLPPSDDAEFRPPELQGERCDAKMEVNSESTALQRLLAQPNKRFKIWQDKQPQLQPLHFLDPLPLSQQPGDSLGEVNDPYTFEDGDIKYIFTANKKCKQGTEKDSLKKNKSEDGFGTKDVTTPGHSTPVPDGKNAMSIFSSATKTDVRQDNAAGRAGSSSLTQVTDLAPSLHDLDNIFDNSDDDELGAVSPALRSSKMPAVGTEDRPLGKDGRAAVPYPPTVADLQRMFPTPPSLEQHPAFSPVMNYKDGISSETVTALGMMESPMVSMVSTQLTEFKMEVEDGLGSPKPEEIKDFSYVHKVPSFQPFVGSSMFAPLKMLPSHCLLPLKIPDACLFRPSWAIPPKIEQLPMPPAATFIRDGYNNVPSVGSLADPDYLNTPQMNTPVTLNSAAPASNSGAGVLPSPATPRFSVPTPRTPRTPRTPRGGGTASGQGSVKYDSTDQGSPASTPSTTRPLNSVEPATMQPIPEAHSLYVTLILSDSVMNIFKDRNFDSCCICACNMNIKGADVGLYIPDSSNEDQYRCTCGFSAIMNRKLGYNSGLFLEDELDIFGKNSDIGQAAERRLMMCQSTFLPQVEGTKKPQEPPISLLLLLQNQHTQPFASLNFLDYISSNNRQTLPCVSWSYDRVQADNNDYWTECFNALEQGRQYVDNPTGGKVDEALVRSATVHSWPHSNVLDISMLSSQDVVRMLLSLQPFLQDAIQKKRTGRTWENIQHVQGPLTWQQFHKMAGRGTYGSEESPEPLPIPTLLVGYDKDFLTISPFSLPFWERLLLDPYGGHRDVAYIVVCPENEALLEGAKTFFRDLSAVYEMCRLGQHKPICKVLRDGIMRM

SEQ ID NO: 2973 - protein, 376 aa, Homo sapiens [sequence omitted]

SEQ ID NO: 2974 - protein, 1176 aa, Homo sapiens
MALARPGTPDPQALASVLLLLLWAPALSLLAGTVPSEPPSACASDPCAPGTECQATESGGYTCGPMEPRGCATQPCHHGALCVPQGPDPNGFRCYCVPGFQGPRCELDIDECASRPCHHGATCRNLADRYECHCPLGYAGVTCETEVDECASAPCLHGASCLDGVGSFRCVCAPGYGGTRCQLDLDECQSQPCAHGGTCHDLVNGFRCDCAGTGYEGTHCEREVLECASAPCEHNASCLEGLGSFRCLCWPGYSGELCEVDEDECASSPCQHGGRCLQRSDPALYGGVQAAFPGAFSFRHAAGFLCHCPPGFEGADCGVEVDECASRPCLNGGHCQDLPNGFQCHCPDGYAGPTCEEDVDECLSDPCLHGGTCSDTVAGYICRCPETWGGRDCSVQLTGCQGHTCPLAATCIPIFESGVHSYVCHCPPGTHGPFCGQNTTFSVMAGSPIQASVPAGGPLGLALRFRTTLPAGTLATRNDTKESLELALVAATLQATLWSYSTTVLVLRLPDLALNDGHWHQVEVVLHLATLELRLWHEGCPARLCVASGPVALASTASATPLPAGISSAQLGDATFAGCLQDVRVDGHLLLPEDLGENVLLGCERREQCRPLPCVHGGSCVDLWTHFRCDCARPHRGPTCADEIPAATFGLGGAPSSASFLLQELPGPNLTVSFLLRTRESAGLLLQFANDSAAGLTVFLSEGRIRAEAPGSPAVVLPGRWDDGLRHLVMLSFGPDQLQDLGQHVHVGGRLLAADSQPWGGPFRGCLQDLRLDGCHLPFFPLPLDNSSQPSELGGRQSWNLTAGCVSEDMCSPDPCFNGGTCLVTWNDFHCTCPANFTGPTCAQQLWCPGQPCLPPATCEEVPDGFVCVAEATFREGPPAAFSGHNASSGRLLGGLSLAFRTRDSEAWLLRAAAGALEGVWLAVRNGSLAGGVRGGHGLPGAVLPIPGPRVADGAWHRVRLAMERPAAATSRWLLWLDGAATPVALRGLASDLGFLQGPGAVRILLAENFTGCLGRVALGGLPLPLARPRPGAAPGAREHFASWPGTPAPILGCRGAPVCAPSPCLHDGACRDLFDAFACACGPGWEGPRCEAHVDPCHSAPCARGRCHTHPDGRFECRCPPGFGGPRCRWDGWAGGWAANAPWGYGGAEKSARSVDESLPFPGPHVLICDMRRTV

SEQ ID NO: 2975 - protein, 161 aa, Homo sapiens
MEYTGSKYIGEYVDGRMEGKAKYILPTETIYVGEMKDGMFHGEGALYFPSGSQYDAIWENGLAIKGTYTFSDGLHYDEKNWHYCDGYDRRFYTEILNGLKPAGMAQLTNMDPPRKIPKGYYDCGDGFYNPVTRVVKDYRNRFLRNADDDEHEWITRTCRKG

SEQ ID NO: 2976 - protein, 1181 aa, Homo sapiens
MAAVQVVGSWPSVQPREAPREAIPERGNGFRLLSARLCALRPDDSSSARTEIHLLFDQLISENYSEGSGVAPEDVSALLVQACRLVPLNQNHLVSKVSQLIHHLLNRLQVIVDEQHLDFLLAYTISAIHQCSSWTHREILQALAALVYCNGSKCQKYLPELLGNTGLLMKLSDLAQSDPEVRRAAVHCMANLCLSVPGQPYLEEPYQNVCFQAFLTILQSPKSSDMDDITFCMLLQNALKGIQSLLNGGRMKLTQTDELGALLAVLKKFMFHGLPGLNIEMPTVLYPTPLPQYDGRTPIKPQQSESSASRPTLNKKKKSKVKPKKIQQGEEEEKESSGEIEAAPVTGTGRVNLHEGNTWCPSSLGVQSLPLDGSGAAEKDGVSSSFSSSSWKRVSSSESDFSDAEGGMQSKMRSYQAKVRQGALVCFLSTIKSIEKKVLYGYWSAFIPDTPELGSPQSVSLMTLTLKDPSPKTRACALQVLSAILEGSKQFLSVAEDTSDHRRAFTPFSVMIACSIRELHRCLLLALVAESSSQTVTQIIKCLANLVSNAPYDRLKLSLLTKVWNQIKPYIRHKDVNVRVSSLTLLGAIVSTHAPLPEVQLLLQQPCSSGLGNSNSATPHLSPPDWWKKAPAGPSLEETSVSSPKGSSEPCWLIRLCISIVVLPKEDSCSGSDAGSAAGSTYEPSPMRLEALQVLTLLARGYFSMTQAYLMELGEVICKCMGEADPSIQLHGAKLLEELGTGLIQQYKPDSTAAPDQRAPVFLVVMFWTMMLNGPLPRALQNSEHPTLQASACDALSSILPEAFSNLPNDRQMLCITVLLGLNDSKNRLVKAATSRALGVYVLFPCLRQDVIFVADAANAILMSLEDKSLNVRAKAAWSLGNLTDTLIVNMETPDPSFQEEFSGLLLLKMLRSAIEASKDKDKVKSNAVRALGNLLHFLQPSHIEKPTFAEIIEESIQALISTVLTEAAMKVRWNACYAMGNVFKNPALPLGTAPWTSQAYNALTSVVTSCKNFKVRIRSAAALSVPGKREQYGSVDQYARIWNALVTALQKSEDTIDFLEFKYCVSLRTQICQALIHLLSLASASDLPCMKETLELSGNMVQSYILQFLKSGAEGDDTGAPHSPQERDQMVRMALKHMGSIQAPTGDTARRAIMGFLEEILAVCFDSSGSQGALPGLTNQ

SEQ ID NO: 2977 - protein, 276 aa, Homo sapiens
MSHDLVAVGRKSENFHPVFEHLDSTQNTENKPTGEFAQEIITIIHQVKANYFPSPGITLHERFSTMQDIHKADVNEIPLNSDPEIHRRIDMSLAELQSKQAVIYESEQTLIKIIDPNDLRHDIERRRKERLQNEDEHIFHIASAAERDDQNSSFSKVKNVHTDGFQKPTHFIKSNFRKCIEKPYMNYTTQRKDIITHKPFEVEGNHRNTRVRPFKSNFRGGRCQPNYKSGLVQKSLYIQAKYQRLRFTGPRGFITHKFRERLMRKKKEYTDVATGI

SEQ ID NO: 2978 - protein, 132 aa, Homo sapiens [sequence omitted]

SEQ ID NO: 2979 - protein, 455 aa, Homo sapiens
MAAPEEHDSPTEASQPIVEEEETKTFKDLGVTDVLCEACDQLGWTKPTKIQIEAIPLALQGRDIIGLAETGSGKTGAFALPILNALLETPQRLFALVLTPTRELAFQISEQFEALGSSIGVQSAVIVGGIDSMSQSLALAKKPHIIIATPGRLIDHLENTKGFNLRALKYLVMDEADRILNMDFETEVDKILKVIPRDRKTFLFSATMTKKVQKLQRAALKNPVKCAVSSKYQTVEKLQQYYIFIPSKFKDTYLVYILNELAGNSFMIFCSTCNNTQRTALLLRNLGFTAIPLHGQMSQSKRLGSLNKFKAKARSILLATDVASRGLDIPHVDVVVNFDIPTHSKDYIHRVGRTARAGRSGKAITFVTQYDVELFQRIEHLIGKKLPGFPTQDDEVMMLTERVAEAQRFARMELREHGEKKKRSREDAGDNDDTEGAIGVRNKVAGGKMKKRKGR

SEQ ID NO: 2980 - protein, 576 aa, Homo sapiens [sequence omitted]

SEQ ID NO: 2981 - protein, 264 aa, Homo sapiens
MNPFVLIDLAGAFALCITYMLIEINNYFAVDTASAIAIALMTFGTMYPMSVYSGKVLLQTTPPHVIGQLDKLIREVSTLDGVLEVRNEHFWTLGFGSLAGSVHVRIRRDANEQMVLAHVTNRLYTLVSTLTVQIFKDDWIRPALLSGPVAANVLNFSDHHVIPMPLLKGTDDLNPVTSTPAKPSSPPPEFSFNTPGKNVNPVILLNTQTRPYGFGLNHGHTPYSSMLNQGLGVPGIGATQGLRTGFTNIPSRYGTNNRIGQPRP

SEQ ID NO: 2982 - protein, 161 aa, Homo sapiens
MGLLGGKQIGAGEPAETAPCTVLRVRLKHTQTSGVARSCCVPEPLGPVAATRGIPTREDLSIVLKGRFRWRRPENRLECCLRAVLPAGPEPAQTFTLTPACRRHCCLVMLRSGLSSPSLTRQLQSPPYLPTAENGACIKPSRETQWGMDPKHGRCTHFAFL

SEQ ID NO: 2983 - protein, 105 aa, Homo sapiens
MLPIQPAEPSGFSRCGCCREVRSPTWRPRGLALETGGRSCQSLVLGLATGIALLPPYSIAQAVTEPTWLQQEGARTPPPNGSSGEEFTVIFNLSYPLRRNRFSAT

SEQ ID NO: 2984 - protein, 618 aa, Homo sapiens
METEAASTAVRTQTQAPRVVATRSTPSTQTVARASRRAQSITEAATGHARTQPLACDAAAPLDSHCSRTGRHAKTSTSAWSTTEAATTSAATPWAASSAAAGRATSCSPTSAPARTSTSAPSSGPVTTSASTPQARAKETARQPLLDHCHVTFVTLKCDSSKKRRRGRKSPSKEVSHITAEFEIETKMEEASDTCEADCLRKRAEQSLQAAIKTLRKSIGRQQFYVQVSGTEYEVAQRPAKALEGQGACGAGQVLQDSKCVACGPGTHFGGELGQCVPCMPGTYQDMEGQLSCTPCPSSDGLGLPGARNVSECGGQCSPGFFSADGFKPCQACPVGTYQPEPGRTGCFPCGGGLLTKHEGTTSFQDCEAKVHCSPGHHYNTTTHRCIRCPVGTYQPEFGQNHCITCPGNTSTDFDGSTNVTHCKNQHCGGELGDYTGYIESPNYPGDYPANAECVWHIAPPPKRRILIVVPEIFLPIEDECGDVLVMRKSASPTSITTYETCQTYERPIAFTSRSRKLWIQFKSNEGNSGKGFQVPYVTYDEDYQQLIEDIVRDGRLYASENHQEILKDKKLIKALFDVLAHPQNYFKYTAQESKEMFPRSFIKLLRSKVSRFLRPYK

SEQ ID NO: 2985 - protein, 230 aa, Homo sapiens
MNFGSVLLKAREKPHAPVHTNRHFCPDLCLNQAWTHLAVDLLSPSRLLLCWASRQRMRGEGGKGGLERSAHFSVLELGKIFNVPVTGVSGLARKASPLPERVLAADAEQQLREVSAQGSSPLTTLPQIRTGIPGRLTREAPQRKAQGSDLPGTKHAPEGQRRRRALPDPTLQNPALSQAPTPGLQTRLPPLAALPAPTLSHGDAWAPLALVGETARTTLTARLLRGLEES

SEQ ID NO: 2986 - protein, 733 aa, Homo sapiens [sequence omitted]

SEQ ID NO: 2987 - protein, 1167 aa, Homo sapiens [sequence omitted]

SEQ ID NO: 2988 - protein, 165 aa, Homo sapiens
MEICHFGQVLLTVPVTSPRRRATTSRPHDPSDCHHTGPRRRISMAFLTLCLQRISFFIVFFFFFYFLFSFFFETESLSVAQAGVQWHDLGSLQPRPPGFKQFSCLSLPSSWDYGHTPQRSANFCIFRKDRVLPCWPGWSRSSELVIHLPRPPKCWDYRREPPHPA

SEQ ID NO: 2989 - protein, 382 aa, Homo sapiens
MLDGLKMEENFQSAIDTSASFSSLLGRAVSPKSVCEGCQRVILDRFLLRLNDSFWHEQCVQCASCKEPLETTCFYRDKKLYCKYDYEKLFAVKCGGCFEAIAPNEFVMRAQKSVYHLSCFCCCVCERQLQKGDEFVLKEGQLLCKGDYEKERELLSLVSPAASDSGKSDDEESLCKSAHGAGKGTAEEGKDHKRPKRPRTILTTQQRRAFKASFEVSSKPCRKVRETLAAETGLSVRVVQVWFQNQRAKMKKLARRQQQQQQDQQNTQRLSSAQTNGGGSAGMEGIMNPYTALPTPQQLLAIEQSVYSSDPFRQGLTPPQMPGDHMHPYGAEPLFHDLDSDDTSLSNLGDCFLATSEAGPLQSRVGNPIDHLYSMQNSYFTS

SEQ ID NO: 2990 - protein, 159 aa, Homo sapiens
MHQTHAIQRLEVLPSFSNESPTSRETSESWTNQDDIFYAYASMSPGAEHRGTTQLLRFQLAPIKKLEGSLQTHFLLSSLHPRMTFPGRAGGGEAGSRPPRRPWAGILILQLPSTRGGRRSGHGAVRSWGPWKVVAEQPVGGTDPPAHGGRGRPSPNENT

SEQ ID NO: 2991 - protein, 509 aa, Homo sapiens
MEHEQTDITSRDSRGNNILHALVTVAEDFKTQNDFVKRMYDMILLRSGNWELETTRNNDGLTPLQLAAKMGKAEILKYILSREIKEKRLRSLSRKFTDWAYGPVSSSLYDLTNVDTTTDNSVLEITVYNTNIDNRHEMLTLEPLHTLLHMKWKKFAKHMFFLSFCFYFFYNITLTLVSYYRPREEEAIPHPLALTHKMGWLQLLGRMFVLIWAMCISVKEGIAIFLLRPSDLQSILSDAWFHFVFFIQAVLVILSVFLYLFAYKEYLACLVLAMALGWANMLYYTRGFQSMGMYSVMIQKVILHDVLKFLFVYIVFLLGFGVALASLIEKCPKDNKDCSSYGSFSDAVLELFKLTIGLGDLNIQQNSKYPILFLFLLITYVILTFVLLLNMLIALMGETVENVSKESERIWRLQRARTILEFEKMLPEWLRSRFRMGELCKVAEDDFRLCLRINEVKWTEWKTHVSFLNEDPGPVRRTDFNKIQDSSRNNSKTTLNAFEEVEEFPETSV

SEQ ID NO: 2992 - protein, 639 aa, Homo sapiens
MCQEQVDPDSLKNVIARAISKLPIVHFCSSKPRVEYSTKIVEVFCGKELYGYLCVIKVKAFCCVVFSEAPKSWMVREKYIRPLTTEEWVEKMMDADPEFPPDFAEAFESQLSLSDSPSLCRPVYSKKGLEHKADLQQHLFPVPPGHLECTPESLWKELSLQHEGLKELIHKQMRPFSQGIVILSRSWAVDLNLQEKPGVICDALLIAQNSTPILYTILREQDAEGQDYCTRTAFTLKQKLVNMGGYTGKVCVRAKVLCLSPESSAEALEAAVSPMDYPASYSLAGTQHMEALLQSLVIVLLGFRSLLSDQLGCEVLNLLTAQQYEIFSRSLRKNRELFVHGLPGSGKTIMAMKIMEKIRNVFHCEAHRILYVCENQPLRNFISDRNICRAETRETFLREKFEHIQHIVIDEAQNFRTEDGDWYRKAKTITQREKDCPGVLWIFLDYFQTSHLGHSGLPPLSAQYPREELTRVVRNADEIAEYIQQEMQLIIENPPINIPHGYLAILSEAKWVPGVPGNTKIIKNFTLEQIVTYVADTCRCFFERGYSPKDVAVLVSTVTEVEQYQSKLLKAMRKKMVVQLSDACDMLGVHIVLDSVRRFSGLERSIVFGIHPRTADPAILPNILICLASRAKQHLYIFL

SEQ ID NO: 2993 - protein, 870 aa, Homo sapiens
MLSMLMHSSSKEVFQASANALSTLLEQNVNFRKILLSKGIHLNVLELMQKHIHSPEVAESGCKMLNHLFEGSNTSLDIMAAVVPKILTVMKRHETSLPVQLEALRAILHFIVPGMPEESREDTEFHHKLNMVKKQCFKNDIHKLVLAALNRFIGNPGIQKCGLKVISSIVHFPDALEMLSLEGAMDSVLHTLQMYPDDQEIQCLGLSLIGYLITKKNVFIGTGHLLAKILVSSLYRFKDVAEIQTKGFQTILAILKLSASFSKLLVHHSFDLVIFHQMSSNIMEQKDQQFLNLCCKCFAKVAMDDYLKNVMLERACDQNNSIMVECLLLLGADANQAKEGSSLICQVCEKESSPKLVELLLNSGSREQDVRKALTISIGKGDSQIISLLLRRLALDVANNSICLGGFCIGKVEPSWLGPLFPDKTSNLRKQTNIASTLARMVIRYQMKSAVEEGTASGSDGNFSEDVLSKFDEWTFIPDSSMDSVFAQSDDLDSEGSEGSFLVKKKSNSISVGEFYRDAVLQRCSPNLQRHSNSLGPIFDHEDLLKRKRKILSSDDSLRSSKLQSHMRHSDSISSLASEREYITSLDLSANELRDIDALSQKCCISVHLEHLEKLELHQNALTSFPQQLCETLKSLTHLDLHSNKFTSFPSYLLKMSCIANLDVSRNDIGPSVVLDPTVKCPTLKQFNLSYNQLSFVPENLTDVVEKLEQLILEGNKISGICSPLRLKELKILNLSKNHISSLSENFLEACPKVESFSARMNFLAAMPFLPPSMTILKLSQNKFSCIPEAILNLPHLRSLDMSSNDIQYLPGPAHWKSLNLRELLFSHNQISILDLSEKAYLWSRVEKLHLSHNKLKEVRRLLPLKKYTL

SEQ ID NO: 2994 - protein, 200 aa, Homo sapiens
MKGTQRWSVTRPGDRPDMWCPHPEGRPWRDDPPLPPPPIRLWTPSSLPPSTLPDPPKSPGSSLPQGTRSTAPSIPNGPDSQRGVRKEKAISHRLILLAPGSSTGRRVGLCRHDGSVVREGPPPMCLGRGPPKPLRGSAKGLESAPAHTGPCSLVAIVSATSTFRSLPRACPRSLSPPWHAPLCPHTLCVSGDSGDSSGVT

SEQ ID NO: 2995 - protein, 121 aa, Homo sapiens
MEISCTSQGFFFLKEHSSGVSSVKAAQMPGRTLYRSLCSCVFPLHSPTRPPSPASAPKGFLLLSPTSSNASKLMPYYLFHRSRGVDNSKISVLILLGCELEQTKKKKLGPATALGNSGRVE

SEQ ID NO: 2996 - protein, 121 aa, Homo sapiens
MAARLLGRVNPANTVRAGLRLGCCAAFPGLRLGFPHPVWRFATPGIWRRSRRPRGEVRPEPQNPDTHGLPRRAPAFLSLGDWFLRQPWNHCDGKSHSRLAQEHWLGGLALRSWQSGCVPFK

SEQ ID NO: 2997 - protein, 1113 aa, Homo sapiens [sequence omitted]

SEQ ID NO: 2998 - protein, 1162 aa, Homo sapiens
MASLLPLLCLCVVAAHLAGARDATPTEEPMATALGLERRSVYTGQPSPALEDWEARAVPAEASEWTSWFNVDHPGGDGDFESLAAIRFYYGPARVCPRPLALEARTTDWALPSAVGERVHLNPTRGFWCLNREQPRGRRCSNYHVRFRCPLEASWGAWGPWGPCSGSCGPGRRLRRRHCPSPAGDACPGRPLEAQKCVRPRCPGCSLDTCECPDHILLGSVVTPSGQPLLGARVSLRDQPGTVATSDAHGTFRVPGVCADSRANIRAQMDGFSAGEAQAQANGSISVVTIILDKLEKPYLVKHPESRVREAGQNVTFCCKASGTPMPKKYSWFHNGTLLDRRAHGYGAHLELRGLRPDQAGIYHCKAWNEAGAVRSGTARLTVLAPGQPACDPRPREYLIKLPEDCGQPGSGPAYLDVGLCPDTRCPSLAGSSPRCGDASSRCCSVRRLERREIHCPGYVLPVKVVAECGCQKCLPPRGLVRGRVVAADSGEPLRFARILLGQEPIGFTAYQGDFTIEVPPSTQRLVVTFVDPSGEFMDAVRVLPFDPRGAGVYHEVKAMRKKAPVILHTSQSNTIPLGELEDEAPLGELVLPSGAFRRADGKPYSGPVEARVTFVDPRDLTSAASAPSDLRFVDSDGELAPLRTYGMFSVDLRAPGSAEQLQVGPVAVRVAASQIHMPGHVEALKLWSLNPETGLWEEESGFRREGSSGPRVRREERVFLVGNVEIRERRLFNLDVPERRRCFVKVRAYANDKFTPSEQVEGVVVTLVNLEPAPGFSANPRAWGRFDSAVTGPNGACLPAFCDADRPDAYTALVTATLGGEELEPAPSLPRPLPATVGVTQPYLDRLGYRRTDHDDPAFKRNGFRINLAKPRPGDPAEANGPVYPWRSLRECQGAPVTASHFRFARVEADKYEYNVVPFREGTPASWTGDLLAWWPNPQEFRACFLKVKIQGPQEYMVRSHNAGGSHPRTRGQLYGLRDARSVRDPERPGTSAACVEFKCSGMLFDQRQVDRTLVTIMPQGSCRRVAVNGLLRDYLTRHPPPVPAEDPAAFSMLAPLDPLGHNYGVYTVTDQSPRLAKEIAIGRCFDGSSDGFSREMKADAGTAVTFQCREPPAGRPSLFQRLLESPATALGDIRREMSEAAQAQARASGPLRTRRGRVRQ

SEQ ID NO: 2999 - protein, 238 aa, Homo sapiens
MSNQQEKYEAQNIVNSTEESDDAFDTVTIPVPSEEPQESDQTEEHESGIEQFSESHAIHVEEQSDQSFSSLEPDNEQLMEEVISPRQVSYTPQHHEKQYAMQRPNDDSLAFLDKIKSVKESLQESVEDSLATVKVVLIPVGQEIVIPFKVDTILKYLKDHFSHLLGIPHSVLQIRYSGKILKNNETLVQHGVKPQEIVQVEIFSTNPDLYPVRRIDGLTDVSQIITVTVQTGSLFDVF

SEQ ID NO: 3000 - protein, 174 aa, Homo sapiens [sequence omitted]

SEQ ID NO: 3001 - protein, 116 aa, Homo sapiens
MSLPRGNLSLFIGSFLCRMQGSLPPAETPGKEATCGGDLNQDGRNLGSPGGSGQRSWWKPWEVGLPLGFSPGHVAHVWLSLGPDPSLHTELHFYRALSLAAGSSSHPLLSTPIPLL

SEQ ID NO: 3002 - protein, 538 aa, Homo sapiens
MTKSKEAVTFKDVAVVFSEEELQLLDLAQRKLYRDVMLENFRNVVSVGHQSTPDGLPQLEREEKLWMMKMATQRDNSSGAKNLKEMETLQEVGLRYLPHEELFCSQIWQQITRELIKYQDSVVNIQRTGCQLEKRDDLHYKDEGFSNQSSHLQVHRVHTGEKPYKGEHCVKSFSWSSHLQINQRAHAGEKPYKCEKCDNAFRRFSSLQAHQRVHSRAKSYTNDASYRSFSQRSHLPHHQRVPTGENPYKYEECGKNVGKSSHCQAPLIVHTGEKPYKCEECGVGFSQRSYLQVHLKVHAGKKRYKCEECGKSFSWRSRLQAHERIHTGEKPYKCNACGKSFSYSSHLNIHCRIHTGEKPYKCEECGKGFSVGSHLQAHQISHTGEKPYKCEECGKGFCRASNLLDHQRGHTGEKPYQCDACGKGFSRSSDFNIHFRVHTGKNPINVRSVARASARPQIFWPIKEATLERNPTNVVHVGRASVGAQILMYTVESTQERNPINARSVVRPSVSSPAFRCIREFTLERNHISVQSVGRASV

SEQ ID NO: 3003 - protein, 218 aa, Homo sapiens
MQTCSGKGIKMAFLDVQSSSTPQSLPLLLFSHREGGGRGAGDPGAPAVVPAPVSAPRPASSPARSESRSPPLTLISRHITCCSCESPGDVLLSGRGGGGGGGGGARTGGGEGEDRRPRPDFSRVTAVAIPGWMEVESPPHPPPQPQVCPTPSQGAPGHGRAGLPEGKGPGGRDWVRSQSSRCSRATLFGHRAPSPAAPRRGRLPAPGFPSLHSAVSLF

SEQ ID NO: 3004 - protein, 802 aa, Homo sapiens
MQPQIVAVPLVLNKMMAKVLERNEEPLEMDLLLNSQVLREKNKRRKIKGKKERSQVDQLLNISLREEELSKSLQCMDNNLLQARAALQTAYVEVQRLLMLKQQITMEMSALRTHRIQILQGLQETYEPSEHPDQVPCSLTRERRNSRSQTSIDAALLPTPFFPLFLEPPSSHVSPSPTGASLQITTSPTFQTHGSVPAPDSSVQIKQEPMSPEQDENVNAVPPSSACNVSKELLEANKTPLEKEPHSPADQPEQQAESTLTSAETRGSKKKKKLRKKKSLRAAHVPENSDTEQDVLTVKPVRKVKAGKLIKGGKVTTSTWEDSRTGREQESVRDEPDSDSSLEVLEIPNPQLEVVAIDSSESGEEKPDSPSKKDIWNSTEQNPLETSRSGCDEVSSTSEIGTRYKDGIPVSVAETQTVISSIKGSKNSSEISSEPGDDDEPTEGSFEGHQAAVNAIQIFGNLLYTCSADKTVRVYNLVSRKCIGVFEGHTSKVNCLLVTQTSGKNAALYTGSSDHTIRCYNVKSRECVEQLQLEDRVLCLHSRWRILYAGLANGTVVTFNIKNNKRLEIFECHGPRAVSCLATAQEGARKLLVVGSYDCTISVRDARNGLLLRTLEGHSKTILCMKVVNDLVFSGSSDQSVHAHNIHTGELVRIYKGHNHAVTVVNILGKVMVTACLDKFVRVYELQSHDRLQVYGGHKDMIMCMTIHKSMIYTGCYDGSIQAVRLNLMQNYRCWWHGCSLIFGVVDHLKQHLLTDHTNPNFQTLKCRWKNCDAFFTARKGSKQDAAGHIERHAEDDSKIDS

SEQ ID NO: 3005 - protein, 234 aa, Homo sapiens
MGPGGRVARLLAPLMWRRAVSSVAGSAVGAEPGLRLLAVQRLPVGAAFCRACQTPNFVRGLHSEPGLEERAEGTVNEGRPESDAADHTGPKFDIDMMVSLLRQENARDICVIQVPPEMRYTDYFVIVSGTSTRHLHAMAFYVVKMYKHLKCKRDPHVKIEGKDTDDWLCVDFGSMVIHLMLPETREIYELEKLWTLRSYDDQLAQIAPETVPEDFILGIEDDTSSVTPVELKCE

SEQ ID NO: 3006 - protein, 576 aa, Homo sapiens
MWAPRCRRFWSRWEQVAALLLLLLLLGVPPRSLALPPIRYSHAGICPNDMNPNLWVDAQSTCRRECETDQECETYEKCCPNVCGTKSCVAARYMDVKGKKGPVGMPKEATCDHFMCLQQGSECDIWDGQPVCKCKDRCEKEPSFTCASDGLTYYNRCYMDAEACSKGITLAVVTCRYHFTWPNTSPPPPETTMHPTTASPETPELDMAAPALLNNPVHQSVTMGETVSFLCDVVGRPRPEITWEKQLEDRENVVMRPNHVRGNVVVTNIAQLVIYNAQLQDAGIYTCTARNVAGVLRADFPLSVVRGHQAAATSESSPNGTAFPAAECLKPPDSEDCGEEQTRWHFDAQANNCLTFTFGHCHRNLNHFETYEACMLACMSGPLAACSLPALQGPCKAYAPRWAYNSQTGQCQSFVYGGCEGNGNNFESREACEESCPFPRGNQRCRACKPRQKLVTSFCRSDFVILGRVSELTEEPDSGRALVTVDEVLKDEKMGLKFLGQEPLEVTLLHVDWACPCPNVTVSEMPLIIMGEVDGGMAMLRPDSFVGASSARRVRKLREVMHKKTCDVLKEFLGLH

SEQ ID NO: 3007 - protein, 600 aa, Homo sapiens [sequence omitted]

SEQ ID NO: 3008 - protein, 451 aa, Homo sapiens
MNSNKVPSAAPGPGFPLLWLPRDPPAPASGPGFPGSSSQHPGPPPCLTRSRACALGGPRSLTCPGLGPQFACTVIAILLHFLYLCTFSWALLEALHLYRALTEVRDVNTGPMRFYYMLGWGVPAFITGTPTHSHIPGSTFVPCSLHPHTGPEAPHPHAPGRLIHRCPSGLTQTLQPPPRRHSLILGRSVGADGGQNPFPCFMPGPVSPPARSPTSQAPHHPSTAPVCLHAPGLAVGLDPEGYGNPDFCWLSIYDTLIWSFAGPVAFAVSMSVFLYILAARASCAAQRQGFEKKGPVSGLQPSFAVLLLLSATWLLALLSVNSDTLLFHYLFATCNCIQVPGPACGEGRHLGCGCLNMHRPLLPLACQGPFIFLSYVVLSKEVRKALKLACSRKPSPDPALTTKSTLTSSYNCPSPYADGRLYQPYGDSAGSLHSTSRSGKSQPSYIPFLLR

SEQ ID NO: 3009 - protein, 928 aa, Homo sapiens [sequence omitted]

SEQ ID NO: 3010 - protein, 492 aa, Homo sapiens
MCAGRTAAGGSFQRRALWVLAFCTSFGLLLSWSSNRLLYWLSFPSHTRVHREWSRQLPFPAVTVCNNNPLRFPRLSKGDLYYAGHWLGLLLPNRTARPLVSELLRGDEPRRQWFRKLADFRLFLPPRHFEGISAAFMDRLGHQLEDMLLSCKYRGELCGPHNFSSVFTKYGKCYMFNSGEDGKPLLTTVKGGTGNGLEIMLDIQQDEYLPIWGETEETTFEAGVKVQIHSQSEPPFIQELGFGVAPGFQTFVATQEQRLTYLPPPWGECRSSEMGLDFFPVYSITACRIDCETRYIVENCNCRMVHMPGDAPFCTPEQHKECAEPALGLLAEKDSNYCLCRTPCNLTRYNKELSMVKIPSKTSAKYLEKKFNKSEKYISENILVLDIFFEALNYETIEQKKAYEVAALLGDIGGQMGLFIGASILTILELFDYIYELIKEKLLDLLGKEEDEGSHDENVSTCDTMPNHSETISHTVNVPLQTTLGTLEEIAC

SEQ ID NO: 3011 - protein, 460 aa, Homo sapiens
MIAKEELESVLEEEVDDFPTFGDSQSDYDTVVHPFYAYWQSFCTQKNFAWKEEYDTRQASNRWEKRAMEKENKKIRDKARKEKNELVRQLVAFIRKRDKRVQAHRKLVEEQNAEKARKAEEMRRQQKLKQAKLVEQYREQSWMTMANLEKELQEMEARYEKEFGDGSDENEMEEHELKDEEDGKDSDEAEDAELYDDLYCPACDKSFKTEKAMKNHEKSKKHREMVALLKQQLEEEEENFSRPQIDENPLDDNSEEEMEDAPKQKLSKKQKKKKQKPAQDVPGKDSYLPAAHFQMAWGKKCVLGERRDGESEHKCAKMLLENRQNYDDNFNVNGPGEGVKVDPEDTNLNQDSAKELEDSPQENVSVTEIIKPCDDPKSEAKSVPKPKGKKTKDMKKPVRVPAEPQTMSVLISCTTCHSEFPSRNKLFDHLKATGHARAPSSSSLNSATSSQSKKEKRKNR

SEQ ID NO: 3012 - protein, 544 aa, Homo sapiens
MTFEDVAVYFSQEEWGLLDTAQRALYRHVMLENFTLVTSLGLSTSRPRVVIQLERGEEPWVPSGKDMTLARNTYGRLNSGSWSLTEDRDVSGEWPRAFPDTPPGMTTSVFPVADACHSVKSLQRQPGASPSQERKPTGVSVIYWERLLLGSRSDQASISLRLTSPLRPPKSSRPREKTFTEYRVPGRQPRTPERQKPCAQEVPGRAFGNASDLKAASGGRDRRMGAAWQEPHRLLGGQEPSTWDELGEALHAGEKSFECRACSKVFVKSSDLLKHLRTHTGERPYECTQCGKAFSQTSHLTQHQRIHSGETPYACPVCGKAFRHSSSLVRHQRIHTAEKSFRCSECGKAFSHGSNLSQHRKIHAGGRPYACAQCGRRFCRNSHLIQHERTHTGEKPFVCALCGAAFSQGSSLFLHQRVHTGEKPFACAQCGRSFSRSSNLTQHQLLHTGERPFRCVGCGKGFAKGAVLLSHRRIHTGEKPFVCTQCGRAFRERPALLHHQRIHTTEKTNAAAPDCTPGPGFLQGHHRKVRRGGKPSPVLKPAKV

SEQ ID NO: 3013 - protein, 162 aa, Homo sapiens
MIWMGSFYAPGLVGINVLRLLTSMYFQCWAVMSSNVPHERVFKASRSNNFYMGLLLLVLFLSLLPVAYTIMSLPPSFDCGPFRCRVSVAREHLPSRGSLLRGPRPRIPVLVSCQPVKGHGTLGESPMPFKRVFCQDGNVRSFCVCAVHFSSHQPPVAVECLK

SEQ ID NO: 3014 - protein, 326 aa, Homo sapiens
MPPSISAFQAAYIGIEVLIALVSVPGNVLVIWAVKVNQALRDATFCFIVSLAVADVAVGALVIPLAILINIGPQTYFHTCLMVACPVLILTQSSILALLAIAVDRYLRVKIPLRYKMVVTPRRAAVAIAGCWILSFVVGLTPMFGWNNLSAVERAWAANGSMGEPVIKCEFEKVISMEYMVYFNFFVWVLPPLLLMVLIYLEVFYLIRKQLNKKVSASSGDPQKYYGKELKIAKSLALILFLFALSWLPLHILNCITLFCPSCHKPSILTYIAIFLTHGNSAMNPIVYAFRIQKFRVTFLKIWNDHFRCQPAPPIDEDLPEERPDD

SEQ ID NO: 3015 - protein, 119 aa, Homo sapiens [sequence omitted]

SEQ ID NO: 3016 - protein, 572 aa, Homo sapiens [sequence omitted]

SEQ ID NO: 3017 - protein, 115 aa, Homo sapiens [sequence omitted]

SEQ ID NO: 3018 - protein, 271 aa, Homo sapiens
MGQGLGEGVPGQHAIREREEQRAPAGTPALGQAAPQHGHQDQPIGCHRQDHIRLEVLEHKAEVGARGQDDEQQQAGLQGREAEGPDVEEVGGGKGGHAWRERGGVPVRKAHPGNGPEVTPQGLREGPSQSTRPHPGRASLQVSPHAVSILALLRTARRPHLPLASKAPWPPALQPLCASHPGLLGYKHLTRPCPGAFTLALPPHRHTALQLCPNVTSSVRPSSATLLQTAVPPAGPHCPLRHLSYCPNTACPHPSLERELPRSRLRPPLCL

SEQ ID NO: 3019 - protein, 725 aa, Homo sapiens [sequence omitted]

SEQ ID NO: 3020 - protein, 294 aa, Homo sapiens
MAVLSAPGLRGFRILGLRSSVGPAVQARGVHQSVATDGPSSTQPALPKARAVAPKPSSRGEYVVAKLDDLVNWARRVSTMSCRPSSSARASLHTHRHTHTHTNVQTRTHTTHACTLTCAHVHASSHVWTDVYTDHTHTHAHNAHMHTRTHAHLHTHAHTSTCAHTLAHIHTCTLALMHTHAHIYTCTRTLAHTCTYMHSHAHTCTLTHMHTRPCVDTCMCACWHACTQAHSLMHTHPCGRGAGRTLPEAPVLAWWPVVPSEDSDPAGDDPSVSVILFLASVCSSCFSFKVKAVF

SEQ ID NO: 3021 - protein, 115 aa, Homo sapiens
MSPKPWQLPCGVKPVGAQESAMRFLNLCLDFRGYMETPGCPGRSLLPEESPHGEPLLGQCGKEMWGWSPHTLSPLGHCLVELCKEDYHPPDPRMVDPMTACTMSLEKLQTLNTSS

SEQ ID NO: 3022 - protein, 124 aa, Homo sapiens [sequence omitted]

SEQ ID NO: 3023 - protein, 846 aa, Homo sapiens
MSNDCISVQATTEENVKHNEASTTEVENKNGPETLAPSNTEEVNITIHKKTNFCKRQCEPFVPVLNKHRSTVLQWPSEMLVYTTTKPSISYSCNPLCFDFKSTKVNNNLDKNKPDLKDLCSQQKQEDICMGPLSDYKDVSTEGLTDYEIGSSKNKCSQVTPLLADDILSSSCDSGKNKNTGQRYKNISCKIRETEKYNFTKSQIKQDTLDEKYNKIRLKETHEYWFHKSRRKKKRKKLCQHHHMEKTKESETRCKMEAENSYTENAGKYLLEPISEKQYLAAEQLLDSHQLLDKRPKSESISLSDNEEMCKTWNTEYNTYDTISSKNHCKKNTTILLNGQSNAKMIHSGKHNLTYSRTYCCWKTKMSSCSQDHRSLVLQNDMKRMSQNQAVKRGYNSVMNESERFYRKRRQHSHSYSSDESLNRQNHLPEEFLRPPSTSVAPCKPKKKRRRKRGRFHPGFETLELKENTDYPVKDNSSLNPLDRLISEDKKEKMKPQEVAKIERNSEQTNQLRDKLSFHPNNLLPSETNGETEHLEMETTSGELSDVSNDPTTSVCVASAPTKEAIDNTLLEHKERSENINLNEKQIPFQVPNIERNFRQSQPKSYLCHYELAEALPQGKMNETPTEWLRYNSGILNTQPPLPFKEAHVSGHTFVTAEQILAPLALPEQALLIPLENHDKFKNVPCEVYQHILQPNMLANKVKFTFPPAALPPPSTPVQPLPLQQSLCSTSVTTIHHTVLQQHAAAAAAAAAAAAAGTFKVLQPHQQFLSQIPALTRTSLPQLSVGPVGPRLCPGNQPTFVAPPQMPIIPASVLHPSHLAFPSLPHALFPSLLSPHPTVIPLQPLF

SEQ ID NO: 3024 - protein, 609 aa, Homo sapiens
MWSPQDRKYNSPPTQLSLKPNSQSLRSGNWSERKSHRLPRLPKRHSHDDMLLLAQLSLPSSPSSLNEDSLSTTSELLSSRRARRIPKLVQRINSIYNAKRGKKRLKKLSMSSIETASLRDENSESESDSDDRFKAHTQRLVHIQSMLKRAPSYRTLELELLEWQERELFEYFVVVSLKKKPSRNTYLPEVSYQFPKLDRPTKQMREAEERLKAIPQFCFPDAKDWLPVSEYSSETFSFMLTGEDGSRRFGYCRRLLPSGKGPRLPEVYCVISRLGCFGLFSKVLDEVERRRGISAALVYPFMRSLMESPFPAPGKTIKVKTFLPGAGNEVLELRRPMDSRLEHVDFECLFTCLSVRQLIRIFASLLLERRVIFVADKLSTLSSCSHAVVALLYPFSWQHTFIPVLPASMIDIVCCPTPFLVGLLSSSLPKLKELPVEEALMVNLGSDRFIRQMDDEDTLLPRKLQAALEQALERKNELISQDSDSDSDDECNTLNGLVSEVFIRFFVETVGHYSLFLTQSEKGERAFQREAFRKSVASKSIRRFLEVFMESQMFAGFIQDRELRKCRAKGLFEQRVEQYLEELPDTEQSGMNKFLRGLGNKMKFLHKKN

SEQ ID NO: 3025 - protein, 476 aa, Homo sapiens
MLENLTLISSLGCWYGAKDETPSKQTLSIQQESPLRTHWTGVCTKKVHLWGMCGPLLGDILHQGTQHNQKLNGFGAYEKKLDDDANHHQDQKQHIGEKSYRSNAKGTSFVKNCKFHMSHEPFIFHEVGKDFLSSLRLLQQEDIHTSGKSNFETKHGIPLQGGKTHYICGESTIPFSNKHSLVLHQRLLPREGPYVCSDSGKFTSKSNSFNNHQGVRTGKRPYQCGQCDESFWYKAHLTEHQRVHTGERPYECGECDKSFSHKHSLVDHQRVHTGERPYECDECGKSFSHKRSLVHHQRVHTGERPYQCGECGKSFNHKCNLIQHQRVHTGERPFECTACGKLFRSNSHLKEHQRVHTGERPYECKECRKSFRYKSHLTEHQRVHTGERPYECRECGKCFHQKGSLIQHQQIHSGERPHECGECGKCFHQKGSLIRHQQIHSGERPHECGECGKCFRQKGNLIKHQRVHTGERHHEC

SEQ ID NO: 3026 - protein, 184 aa, Homo sapiens
MKKIIHHDPVGFIPGMQGWLIICKSINVIHHINRIKNKNQTIISIDAEKAFEEIQHRFMIKTVSKISIQGTYLNVIKAIYDKPTANMILNGEKLKAFPLRIGTRQGCPLSPLLFNIALEVLTRAIRQEKEIKGIQISKEEVKLSLFTNEMIVYLENPKDSSKKLLELIKEFSKPSGYKFNVQNQ

SEQ ID NO: 3027 - protein, 136 aa, Homo sapiens [sequence omitted]

SEQ ID NO: 3028 - protein, 290 aa, Homo sapiens
MAENDVDNELLDYEDDEVETAAGGDGAEAPAKKDVKGSYVSIHSSGFRDFLLKPELLRAIVDCGFEHPSEVQHECIPQAILGMDVLCQAKSGMGKTAVFVLATLQQLEPVTGQVSVLVMCHTRELAFQISKEYERFSKYMPNVKVAVFFGGLSIKKDEEVLKKNCPHIVVGTPGRILALARNKSLNLKHIKHFILDECDKMLEQLDMRRDVQEIFRMTPHEKQVMMFSATLSKEIRPVCRKFMQDVNTLLPSLPPLPARCLLPFLALFLRLPCHSSAKKAACAQLGVMTP

SEQ ID NO: 3029 - protein, 132 aa, Homo sapiens [sequence omitted]

SEQ ID NO: 3030 - protein, 1016 aa, Homo sapiens
MEFQDHRYWLRTHPNCIVGKELVNWLIRNGHIATRAQAIAIGQAMVDGRWLDCVSHHDQLFRDEYALYRPLQSTEFSETPSPDSDSVNSVEGHSEPSWFKDIKFDDSDTEQIAEEGDDNLAKYLISDTGGQQLSISDAFIKESLFNRRVEEKSKELPFTPLGWHHNNLELLREENGEKQAMERLLSANHNHMMALLQQLLHSDSLSSSWRDIIVSLVCQVVQTVRPDVKNQDDDMDIRQFVHIKKIPGGKKFDSVVVNGFVCTKNIAHKKMNSCIKNPKILLLKCSIEYLYREETKFTCIDPIVLQEREFLKNYVQRIVDVRPTLVLVEKTVSRIAQDMLLEHGITLVINVKSQVLERISRMTQGDLVMSMDQLLTKPHLGTCHKFYMQIFQLPNEQTKTLMFFEGCPQHLGCTIKLRGGSDYELARVKEILIFMICVAYHSQLEISFLMDEFAMPPTLMQNPSFHSLIEGRGHEGAVQEQYGGGSIPWDPDIPPESLPCDDSSLLESRIVFEKGEQENKNLPQAVASVKHQEHSTTACPAGLPCAFFAPVPESLLPLPVDDQQDALGSELPESLQQTVVLQDPKSQIRAFRDPLQDDTGLYVTGEVTSSEDKRKTYSLAFKQELKDVILCISPVITFREPFLLTEKGMRCSTRDYFAEQVYWSPLLNKEFKEMENRRKKQLLRDLSGLQGMNGSIQAKSIQVLPSHELVSTRIAEHLGDSQSLGRMLADYRARGGRIQPKNSDPFAHSKDASSTSSGKSGSKNEGDEERGLILSDAVWSTKVDCLNPINHQRLCVLFSSSSAQSSNAPSACVSPWIVTMEFYGKNDLTLGIFLERYCFRPSYQCPSMFCDTPMVHHIRRFVHGQGCVQIILKELDSPVPGYQHTILTYSWCRICKQVTPVVALSNESWSMSFAKYLELRFYGHQYTRRANAEPCGHSIHHDYHQYFSYNQMVASFSYSPIRLLEVCVPLPKIFIKRQAPLKVSLLQDLKDFFQKVSQVYVAIDERLASLKTDTFS

SEQ ID NO: 3031 - protein, 169 aa, Homo sapiens [sequence omitted]

SEQ ID NO: 3032 - protein, 1314 aa, Homo sapiens
MKDNDKNMSTEDTKKNSDEKTDEEKITSFASANVSSDQWSLEDRHSLDSNTPLFPEDSSVGELSFKSENQEEFWHSNPSHLSLDLSGIDSCEMSDSGSQVPDSLPSTPSPVESTKSFSVHSDRESSITNDMGFSDDFSLLESQERCEEELLQLLTHILNYVMCKGLEKSDDDTWIERGQVFSALSKPGISSELLRPSDEIKLTLLQKMLEWAISENREAKTNPVTAENAFRLVLIIQDFLQSEGLVNSNMWTEKLLEDMMLLFDCLSVCYSESPVWVKLSQIQIQLLLGFIGRGNLQVCAMASAKLNTLLQTKVIENQDEACYILGKLEHVLSQSIKEQTEIYSFLIPLVRTLVSKIYELLFMNLHLPSLPFTNGSSSFFEDFQEYCNSNEWQVYIEKYIVPYMKQYEAHTFYDGHENMALYWKDCYEALMVNMHKRDREGGESKLKFQELFVEPFNRKARQENLRYNNMLKRLSSQQLATLRRWKAIQLYLTCERGPWAKRKQNPIHWKLANVENYSRMRLKLVPNYNFKTHEEASALRDNLGIQHSQPSSDTLLLEVVKQVKVSDMVEDKLDLPEEDITARVNVDEKEEQDQKEKLVLMEDCELITIIDVIPGRLEITTQHIYFYDGSIEKEDGVGFDFKWPHSQIREIHLRRYNLRRSALEIFHVDQSNYFLNFKKEVRNKIYSRLLSLHSPNSYYGSRSPQELFKASGLTQKWVNREISNFDYLIQINTMAGRTYNDLAQYPVFPWILQDYTSEELDLNNPAVFRDLSKPIGVVNEKNAKAMREKYENFEDPMGTIDKFHYGTHYSNSAGVMHYLIRVEPFTTLHIQLQSGRFDCADRQFHSIPATWQALMDNPYDVKELIPEFFYFPEFLENQNQFNLGRLQISKELVNDVILPKWAKSAEDFIYKHRKALESEYVSAHLHEWIDLIFGYKQRGPAAVEALNVFYYCSYEGAVDLDALTDEKERKALEGMINNFGQTPCQLLKITISMNYVIGTHGWLPYDRNISNYFTFIKDQTVTNPKTQRSINGSFAPGLEITSKLFVVSHDAKLLFSAGYWDNSIQVMSLTKGKIISHIIRHMDIVTCLATDYCGIHLISGSRDTTCMIWQITQQGGVPVGLASKPFQILYGHTNEVLSVGISTELDMAVSGSRDGTVIIHTIPNLAISWEGHIVVYSSTEEKTTLKDKNALHLFSINGKYLGSQILKEQVSDICIIGEHIVTGSIQGFLSIRDLHSLNLSINPLAMRLPIHCVCVTKEYSHILVGLEDGKLIVVGVGKPAEMRSGQLSRKFWGSSKRLSQISAGETEYNTQDSK

SEQ ID NO: 3033 - protein, 172 aa, Homo sapiens
MTSGELTASSWKVTWAAEGNSLAVRLGLRLPTTTLKPEPTRRVARERAKSPLPRMPTLGASSGTLARLLSLSTRWRLISGLSISSGILVAAREVRNLVSGGLLDCPFCHLPPLIHRNYTAVRHSPSRCSPSATTCQHQGNKLNTTQPLPWGEHRLRKSRDDFCPPPFVPPAE

SEQ ID NO: 3034 - protein, 132 aa, Homo sapiens
MHCDKNNISKELFLFFFFFLRWSFALVAQGGVQWYDLGSPQPLPPGFKQFSCLSLLSSWGYRHVPQRPANFLFLVETGFLYIGQAGLELPTSGDPPASASQSAGITGMSHCARPELFHTLRLCFSIKESVEV

SEQ ID NO: 3035 - protein, 524 aa, Homo sapiens
MNRPSAANPCSPVQFSSTPLAGLAPKRRAGDPGEMPQSPTGLGQPKRRGRPPKMCSGWWWIRDPEMLDAMLKALHPRGIREKALHKHLNKHRDFLQEVCLRPSADPIFEPRQLPAFQEGIMSWSPKEKTYETDLAVLQWVEELEQRVIMSDLQIRGWTCPSPDSTREDLAYCEHLSDSQEDITWRGRGREGLAPQRKTTNPLDLAVMRLAALEQNVERRYLREPLWPTHEVVLEKALLSTPNGAPEGTTTEISYEITPRIRVWRQTLERCRSAAQVCLCLGQLERSIAWEKSVNKVTCLVCRKGDNDEFLLLCDGCDRGCHIYCHRPKMEAVPEGDWFCTVCLAQQVEGEFTQKPGFPKRGQKRKSGYSLNFSEGDGRRRRVLLRGRESPAAGPRYSEEGLSPSKRRRLSMRNHHSDLTFCEIILMEMESHDAAWPFLEPVNPRLVSGYRRIIKNPMDFSTMRERLLRGGYTSSEEFAADALLVFDNCQTFNEDDSEVGKAGHIMRRFFESRWEEFYQGKQANL

SEQ ID NO: 3036 - protein, 938 aa, Homo sapiens
MKGVQQGIEQRVKSFNVGRGRGLPKKIKRKERGGRTNKGPNVFSVSDDFQEYNKPGKKWKVMTQEFINQHTVEHKGKQICKYFLEGRCIKGDQCKFDHDAELEKRKEICKFYLQGYCTKGENCIYMHNEFPCKFYHSGAKCYQGDNCKFSHDDLTKETKKLLDKVLNTDEELINEDERELEELRKRGITPLPKPPPGVGLLPTPPEHFPFSDPEDDFQTDFSDDFRKIPSLFEIVVKPTVDLAHKIGRKPPAFYTSASPPGPQFQGSSPHPQHIYSSGSSPGPGPNMSQGHSSPVMHPGSPGHHPCAGPPGLPVPQSPPLPPGPPEIVGPQNQAGVLVQPDTSLTPPSMGGAYHSPGFPGHVMKVPRENHCSPGSSYQQSPGEMQLNTNYESLQNPAEFYDNYYAQHSIHNFQPPNNSGDGMWHGEFAQQQPPVVQDSPNHGSGSDGSSTRTGHGPLPVPGLLPAVQRALFVRLTQRYQEDEEQTSTQPHRAPSKEEDDTVNWYSSSEEEEGSSVKSILKTLQKQTETLRNQQQPSTELSTPTDPRLAKEKSKGNQVVDPRLRTIPRQDIRKPSESAPLDLRLAWDPRKLRGNGSGHIGSSVGGAKFDLHHANAGTNVKHKRGDDDDEDTERELREKAFLIPLDASPGIMLQDPRSQLRQFSHIKMDITLTKPNFAKHIVWAPEDLLPVPLPKPDPVSSINLPLPPLIADQRLNRLWNTKSDLHQNTVSIDPKLAAKAKINTTNREGYLEQFGDSHGSGAKLGDPRLQKNFDPRLHRLPNTESHQVVMKDSHASKGAPHLPRSNPGSSQPSGAGTSNSGSGALPPYAPKLSSSAGLPLGTSTSVLSGISLYDPRDHGSSSTSELATASSGENSKNQKKSGGLKSSDKTEPSPGEAILPQKPSPNVGVTLEGPADPQADVPRVLVRFRSQQCTAFLFRH

SEQ ID NO: 3037 - protein, 299 aa, Homo sapiens [sequence omitted]

SEQ ID NO: 3038 - protein, 198 aa, Homo sapiens
MHHRNDSQRLGKAGCPPEPSLQMANTNFLSTLSPEHCRPLAGECMNKLKCGAAEAEIMNLPERVGTFSAIPALGGISLPPGVIVMTALHSPAAASAAVTDSAFQIANLADCPQNHSSSSSSSSGGAGGANPAKKKRKRCGVCVPCKRLINCGVCSSCRNRKTGHQICKFRKCEELKKKPGTSLERTPVPSAEAFRWFF

SEQ ID NO: 3039 - protein, 426 aa, Homo sapiens
MLENYGAVASLAAFPFPKPALISQLERGETPWCSVPRGALDGEAPRGISSGYPFLKPAGISHPEQVEEPLNLKLQGEGPSLICPEGVLKRKKEDFILKEEIIEEAQDLMVLSSGPQWCGSQELWFGKTCEEKSRLGRWPGYLNGGRMESSTNDIIEVIVKDEMISVEESSGNTDVNNLLGIHHKILNEQIFYICEECGKCFDQNEDFDQHQKTHNGEKVYGCKECGKAFSFRSHCIAHQRIHSGVKPYECQECAKAFVWKSNLIRHQRIHTGEKPFECKECGKGFSQNTSLTQHQRIHTGEKPYTCKECGKSFTRNPALLRHQRMHTGEKPYECKDCGKGFMWNSDLSQHQRVHTGDKPHECTDCGKSFFCKAHLIRHQRIHTGERPYKCNDCGKAFSQNSVLIKHQRRHARDKPYNCQISHLLEH

SEQ ID NO: 3040 - protein, 439 aa, Homo sapiens
MAEAAALVWIRGPGFGCKAVRCASGRCTVRDFIHRHCQDQNVPVENFFVKCNGAVYSLEPRLCGGKGGFGSMLRALGAQIEKTTNREACRDLSGRRLRDVNHEKAMAEWVKQQAEREAEKEQKRLERLQRKLVEPKHCFTSPDYQQQCHGMAERLEDSVLKGMQAASSKMVSAEISENRKRQWPTKSQTDRGASAGKRRCFWLGMEGLETAEGSNSESSDDDSEEAPSTSGMGFHAPKIGSNGVEMAAKFPSGSQRARVVNTDHGSPEQLQIPVTDSGRHILEDSCAELGESKEHMESRMVTETEETQEKKAESKEPIEEEPTGAGLNKDKETEERTDGERVAEVAPEERENVAVAKLQESQPGNAVIDKETIDLLAFTSVAELELLGLEKLKCELMALGLKCGGTLQERAARLFSVRGLAKEQIDPALFAKPLKGKKK

SEQ ID NO: 3041 - protein, 1162 aa, Homo sapiens
MAAPVPLPVDVAVRSLKEPPIIIVPESLEADTKQDTISNSLEEHVTQILNEQADISSKKEDSHIGKDEEIPDSSKISLSCKKTGSKKKSSQSEGIFLGSESDEDSVRTSSSQRSHDLKFSASIEKERDFKKSSAPLKSEDLGKPSRSKTDRDDKYFSYSKLERDTRYVSSRCRSERERRRSRSHSRSERGSRTNLSYSRSERSHYYDSDRRYHRSSPYRERTRYSRPYTDNRARESSDSEEEYKKTYSRRTSSHSSSYRDLRTSSYSKSDRDCKTETSYLEMERRGKYSSKLERESKRTSENEAIKRCCSPPNELGFRRGSSYSKHDSSASRYKSTLSKPIPKSDKFKNSFCCTELNEEIKQSHSFSLQTPCSKGSELRMINKNPEREKAGSPAPSNRLNDSPTLKKLDELPIFKSEFITHDSHDSIKELDSLSKVKNDQLRSFCPIELNINGSPGAESDLATFCTSKTDAVLMTSDDSVTGSELSPLVKACMLSSNGFQNISRCKEKDLDDTCMLHKKSESPFRETEPLVSPHQDKLMSMPVMTVDYSKTVVKEPVDTRVSCCKTKDSDIYCTLNDSNPSLCNSEAENIEPSVMKISSNSFMNVHLESKPVICDSRNLTDHSKFACEEYKQSIGSTSSASVNHFDDLYQPIGSSGIASSLQSLPPGIKVDSLTLLKCGENTSPVLDAVLKSKKSSEFLKHAGKETIVEVGSDLPDSGKGFASRENRRNNGLSGKCLQEAQEEGNSILPERRGRPEISLDERGEGGHVHTSDDSEVVFSSCDLNLTMEDSDGVTYALKCDSSGHAPEIVSTVHEDYSGSSESSNDESDSEDTDSDDSSIPRNRLQSVVVVPKNSTLPIEETSPCSSRSSQSYRHYSDHWEDERLESRRHLYEEKFESIASKACPQTDKFFLHKGTEKNPEISFTQSSRKQIDNRLPELSHPQSDGVDSTSHTDVKSDPLGHPNSEETVKAKIPSRQQEELPIYSSDFEDVPNKSWQQTTFQNRPDSRLGKTELSFSSSCEIPHVDGLHSSEELRNLGWDFSQEKPSTTYQQPDSSYGACGGHKYQQNAEQYGGTRDYWQGNGYWDPRSGRPPGTGVVYDRTQGQVPDSLTDDREEEENWDQQDGSHFSDQSDKFLLSLQKDKGSVQAPEISSNSIKDTLAVN

SEQ ID NO: 3042 - protein, 211 aa, Homo sapiens [sequence omitted]

SEQ ID NO: 3043 - protein, 1018 aa, Homo sapiens
MNLQAQPKAQNKRKRCLFGGQEPAPKEQPPPLQPPQQSIRVKEEQYLGHEGPGGAVSTSQPVELPPPSSLALLNSVVYGPERTSAAMLSQQVASVKWPNSVMAPGRGPERGGGGGVSDSSWQQQPGQPPPHSTWNCHSLSLYSATKGSPHPGVGVPTYYNHPEALKREKAGGPQLDRYVRPMMPQKVQLEVGRPQAPLNSFHAAKKPPNQSLPLQPFQLAFGHQVNRQVFRQGPPPPNPVAAFPPQKQQQQQQPQQQQQQQQAALPQMPLFENFYSMPQQPSQQPQDFGLQPAGPLGQSHLAHHSMAPYPFPPNPDMNPELRKALLQDSAPQPALPQVQIPFPRRSRRLSKEGILPPSALDGAGTQPGQEATGNLFLHHWPLQQPPPGSLGQPHPEALGFPLELRESQLLPDGERLAPNGREREAPAMGSEEGMRAVSTGDCGQVLRGGVIQSTRRRRRASQEANLLTLAQKAVELASLQNAKDGSGSEEKRKSVLASTTKCGVEFSEPSLATKRAREDSGMVPLIIPVSVPVRTVDPTEAAQAGGLDEDGKGPEQNPAEHKPSVIVTRRRSTRIPGTDAQAQAEDMNVKLEGEPSVRKPKQRPRPEPLIIPTKAGTFIAPPVYSNITPYQSHLRSPVRLADHPSERSFELPPYTPPPILSPVREGSGLYFNAIISTSTIPAPPPITPKSAHRTLLRTNSAEVTPPVLSVMGEATPVSIEPRINVGSRFQAEIPLMRDRALAAADPHKADLVWQPWEDLESSREKQRQVEDLLTAACSSIFPGAGTNQELALHCLHESRGDILETLNKLLLKKPLRPHNHPLATYHYTGSDQWKMAERKLFNKGIAIYKKDFFLVQKLIQTKTVAQCVEFYYTYKKQVKIGRNGTLTFGDVDTSDEKSAQEEVEVDIKTSQKFPRVPLPRRESPSEERLEPKREVKEPRKEGEEEVPEIQEKEEQEEGRERSRRAAAVKATQTLQANESASDILILRSHESNAPGSAGGQASEKPREGTGKSRRALPF

SEQ ID NO: 3044 - protein, 168 aa, Homo sapiens [sequence omitted]

SEQ ID NO: 3045 - protein, 132 aa, Homo sapiens
MWVDPPQHHTQNLSLSQLQWALSVSSRGGFQSGKERGQFLLFPESHPSMSRTHPTLSLLTRSSGVHRACTLAPPERLLQQVHAQAPRGPSESELLVFKMLECCTHGPGCDLGISIFQELLRCFYAAGQSMNT

SEQ ID NO: 3046 - protein, 133 aa, Homo sapiens [sequence omitted]

SEQ ID NO: 3047 - protein, 141 aa, Homo sapiens
MTEPGHSRSAVYPLLYRDGEQTEPSRMGSKSPGNTSQPPAFFSKLTESNSAMVKSKKQEINKKLNTHNRNEPEYSKGPAGSRGSMGPQVGGWPAWAAGAAQWQKPTVHLRKLSGPADHLPPGPLPHIWGAPGQFLDLLGFP

SEQ ID NO: 3048 - protein, 152 aa, Homo sapiens [sequence omitted]

SEQ ID NO: 3049 - protein, 708 aa, Homo sapiens [sequence omitted]

SEQ ID NO: 3050 - protein, 1558 aa, Homo sapiens [sequence omitted]

SEQ ID NO: 3051 - protein, 1223 aa, Homo sapiens
MMSLSVRPQRRLLSARVNRSQSFAGVLGSHERGPSLSFRSFPVFSPPGPPRKPPALSRVSRMFSVAHPAAKVPQPERLDLVYTALKRGLTAYLEVHQQEQEKLQGQIRESKRNSRLGFLYDLDKQVKSIERFLRRLEFHASKIDELYEAYCVQRRLRDGAYNMVRAYTTGSPGSREARDSLAEATRGHREYTESMCLLESELEAQLGEFHLRMKGLAGFARLCVGDQYEICMKYGRQRWKLRGRIEGSGKQVWDSEETIFLPLLTEFLSIKVTELKGLANHVVVGSVSCETKDLFAALPQVVAVDINDLGTIKLSLEVTWSPFDKDDQPSAASSVNKASTVTKRFSTYSQSPPDTPSLREQAFYNMLRRQEELENGTAWSLSSESSDDSSSPQLSGTARHSPAPRPLVQQPEPLPIQVAFRRPETPSSGPLDEEGAVAPVLANGHAPYSRTLSHISEASVDAALAEASVEAVGPESLAWGPSPPTHPAPTHGEHPSPVPPALDPGHSATSSTLGTTGSVPTSTDPAPSAHLDSVHKSTDSGPSELPGPTHTTTGSTYSAITTTHSAPSPLTHTTTGSTHKPIISTLTTTGPTLNIIGPVQTTTSPTHTMPSPTHTTASPTHTSTSPTHTPTSPTHKTSMSPPTTTSPTPSGMGLVQTATSPTHPTTSPTHPTTSPILINVSPSTSLELATLSSPSKHSDPTLPGTDSLPCSPPVSNSYTQADPMAPRTPHPSPAHSSRKPLTSPAPDPSESTVQSLSPTPSPPTPAPQHSDLCLAMAVQTPVPTAAGGSGDRSLEEALGALMAALDDYRGQFPELQGLEQEVTRLESLLMQRQGLTRSRASSLSITVEHALESFSFLNEDEDEDNDVPGDRPPSSPEAGAEDSIDSPSARPLSTGCPALDAALVRHLYHCSRLLLKLGTFGPLRCQEAWALERLLREARVLEAVCEFSRRWEIPASSAQEVVQFSASRPGFLTFWDQCTERLSCFLCPVERVLLTFCNQYGARLSLRQPGLAEAVCVKFLEDALGQKLPRRPQPGPGEQLTVFQFWSFVETLDSPTMEAYVTETAEEVLLVRNLNSDDQAVVLKALRLAPEGRLRRDGLRALSSLLVHGNNKVMAAVSTQLRSLSLGPTFRERALLCFLDQLEDEDVQTRVAGCLALGCIKAPEGIEPLVYLCQTDTEAVREAARQSLQQCGEEGQSAHRRLEESLDALPRIFGPGSMASTAF

SEQ ID NO: 3052 - protein, 1044 aa, Homo sapiens
MGLLLPDYRWFTTVDILADNCEKEPWIILFYFCGTPQSQIQRTHQEKIQIQLTQSFEKEEKPSKDEAEKEKASDKLPRKMLSRDSSQEYTDSTGIDLHEFLVNTLKNNPRDRMMLLKLEQEILDFIGNNESPRKKFPPMTSYHRMLLHRVAAYFGLDHNVDQSGKSVIVNKTSNTRIPDQKFNEHIKDDKGEDFQKRYILKRDNSSFDKDDNQMRIRLKDDRRSKSIEEREEEYQRARDRIFSQDSLCSQENYIIDKRLQDEDASSTQQRRQIFRVNKDASGRSTNSHQSSTENELKYSEPRPWSSTDSDSSLRNLKPAVTKASSFSGISVLTRGDSSGSSKSIGRLSKTGSESSGSVGSSTGSLSHIQQPLPGTALSQSSHGAPVVYPTVSTHSSLSFDGGLNGQVASPSTSFFLLPLEAAGIPPGSILINPQTGQPFINPDGSPVVYNPPMTQQPVRSQVPGPPQPPLPAPPQQPAANHIFSQQDNLGSQFSHMSLARQPSADGSDPHAAMFQSTVVLQSPQQSGYIMTAAPPPHPPPPPPPPPPPPPLPPGQPVPTAGYPASGHPVSQPVLQQPGYIQQPSPQMPACYCAPGHYHSSQPQYRPVPSVHYNSHLNQPLPQPAQQTGYQVIPNQQQNYQGIVGVQQPQSQSLVSGQPNSIGNQIQGVVIPYTSVPTYQVSLPQGSQGIPHQTYQQPVMFPNQSNQGSMPTTGMPVYYSVIPPGQQNNLSSSVGYLQHPGSEQVQFPRTTSPCSSQQLQGHQCTAGPPPPPGGGMVMMQLSVPNNPQSCAHSPPQWKQNKYYCDHQRGQKCVEFSSVDNIVQHSPQLSSPIISPAQSPAPAQLSTLKTVRPSGPPLSIMPQFSRPFVPGQGDSRYPLLGQPLQYNPPAVLHGHIPNQQGQPGSRHGNRGRRQAKKAASTDLGAGETVVGKVLEITELPDGITRMEAEKLFGELFKIGAKIRWLRDPQSQPRRHPLCCGSGDNTANPERSKPSDLASTYTVLATFPSISAAQNALKKQINSVNKFKLRTSKKHYDFHILERASSQ

SEQ ID NO: 3053 - protein, 101 aa, Homo sapiens [sequence omitted]

SEQ ID NO: 3054 - protein, 152 aa, Homo sapiens
MPSGVFPYATAQSHSLGQPHIEVSFSLQTHTSLSHHLGMEIPTRVKVKGPPQASHSLLSFLPDQVCQPMASYAPHPHCFCLHVNETKGLSISWEDWGLLPNGPLCPIIGARHPIHTFAPLLQDSIFLFTQSLYSRIQSWIVVYLPGKLIIFV

SEQ ID NO: 3055 - protein, 119 aa, Homo sapiens [sequence omitted]

SEQ ID NO: 3056 - protein, 551 aa, Homo sapiens
MASALSYVSKFKSFVILFVTPLLLLPLVILMPAKFVRCAYVIILMAIYWCTEVIPLAVTSLMPVLLFPLFQILDSRQVCVQYMKDTNMLFLGGLIVAVAVERWNLHKRIALRTLLWVGAKPARNTATTAMMVPIVEAILQQMEATSAATEAGLELVDKGKAKELPGSQVIFEGPTLGQQEDQERKRLCKAMTLCICYAASIGGTATLTGTGPNVVLLGQMNELFPDSKDLVNFASWFAFAFPNMLVMLLFAWLWLQFVYMRFNFKKSWGCGLESKKNEKAALKVLQEEYRKLGPLSFAEINVLICFFLLVILWFSRDPGFMPGWLTVAWVEGETKYVSDATVAIFVATLLFIVPSQKPKFNFRSQTEEERKTPFYPPPLLDWKVTQEKVPWGIVLLLGGGFALAKGSEASGLSVWMGKQMEPLHAVPPAAITLILSLLVAVFTECTSNVATTTLFLPIFASMSRSIGLNPLYIMLPCTLSASFAFMLPVATPPNAIVFTYGHLKVADMVKTGVIMNIIGVFCVFLAVNTWGRAIFDLDHFPDWANVTHIET

SEQ ID NO: 3057 - protein, 470 aa, Homo sapiens [sequence omitted]

SEQ ID NO: 3058 - protein, 252 aa, Homo sapiens
MCIGGGFLTEFPEQKLFAALLIKCVVQLELIQTIDNIVFFPATSKKEDAENLAAAQRDAVDFDVRVDTQDQGMYRFLTSQQLFKLLDCLLESHRFPKAFNSNNEQRTALWKAGFKGKSKPNLLKQETSSLACGLRILFRMYMDESRVSAWEEVQQRLLNVCSEALSYFLTLTSESHREAWTNLLLLFLTKVLKISDNRFKAHASFYYPLLCEIMQFDLIPELRAVLRRFFLRIGVVFQISQPPEQELGINKQ

SEQ ID NO: 3059 - protein, 129 aa, Homo sapiens
MVYILETEDPPADLGLENLTIPASVLSDPKEDEAKKPLHPCPHLLLTIAGDLHSSFCLERVGSDPGGIRFEALMRFLQIFIWAVGSVFQNVRDSFRQLVRVIPFSLLKVAGREWERPFYAILDSGSEPT

SEQ ID NO: 3060 - protein, 110 aa, Homo sapiens
MLPVAPRHAGGICLLPHTSAPLHVVAPRSTAWGLRGSTSRCPHTVMLGVAEAGQFGFGSSSSARWFSWGWGALAAVRQFWSQPSPGNRPRIISMKNNMPVVIKPLKPQAS

SEQ ID NO: 3061 - protein, 117 aa, Homo sapiens [sequence omitted]

SEQ ID NO: 3062 - protein, 1063 aa, Homo sapiens
MEVLQCDGCDFRAPSYEDLKAHIQDVHTAFLQPTDVAEDNVNELRCGSVNASNQTEVEFSSIKDEFAIAEDLSGQNATSLGTGGYYGHSPGYYGQHIAANPKPTNKFFQCKFCVRYFRSKNLLIEHTRKVHGAQAEGSSSGPPVPGSLNYNIMMHEGFGKVFSCQFCTYKSPRRARIIKHRKMYHKNNLKETTASPPAPAPMPDPVVPPVSLQDPCKELPAEVVERSILESMVKPLTKSRGNFCCEWCSYQTPRRERWCDHMMKKHRSMVKILSSLRQQQEGTNLPDVPNKSAPSPTSNSTYLTMNAASREIPNTTVSNFRGSMGNSIMRPNSSASKFSPMSYPQMKPKSPHNSGLVNLTERSRYGMTDMTNSSADLETNSMLNDSSSDEELNEIDSENGLSAMDHQTSGLSAEQLMGSDGNKLLETKGIPFRRFMNRFQCPFCPFLTMHRRSISRHIENIHLSGKTAVYKCDECPFTCKSSLKLGAHKQCHTGTTSDWDAVNSQSESISSSLNEGVVSYESSSINGRKSGVMLDPLQQQQPPQPPPPPPPPPPSQPQPLQQPQPPQLQPPHQVPPQPQTQPPPTQQPQPPTQAAPLHPYKCTMCNYSTTTLKGLRVHQQHKHSFCDNLPKFEGQPSSLPLENETDSHPSSSNTVKKSQTSILGLSSKNNFVAKASRKLANDFPLDLSPVKKRTRIDEIASNLQSKINQTKQQEDAVINVEDDEEEEEDNEVEIEVELDREEEPTEPIIEVPTSFSAQQIWVRDTSEPQKEPNFRNITHDYNATNGAEIELTLSEDEEDYYGSSTNLKDHQVSNTALLNTQTPIYGTEHNSENTDFGDSGRLYYCKHCDFNNKSARSVSTHYQRMHPYIKFSFRYILDPNDHSAVYRCLECYIDYTNFEDLQQHYGEHHPEAMNVLNFDHSDLIYRCRFCSYTSPNVRSLMPHYQRMHPTVKINNAMIFSSYVVEQQEGLNTESQTLREILNSAPKNMATSTPVARGGGLPATFNKNTPKTFTPECENQKDPLVNTVVVYDCDVCSFASPNMHSVLVHYQKKHPEEKASYFRI

SEQ ID NO: 3063 - protein, 838 aa, Homo sapiens [sequence omitted]

SEQ ID NO: 3064 - protein, 935 aa, Homo sapiens [sequence omitted]

SEQ ID NO: 3065 - protein, 523 aa, Homo sapiens
MINDLHRAIQRTQSAMFNQVLILISTLLCLIFTCICGIQHLERIGKKLNLFDSLYFCIVTFSTVGFGDVTPETWSSKLFVVAMICVALVVLPIQFEQLAYLWMERQKSGGNYSRHRAQTEKHVVLCVSSLKIDLLMDFLNEFYAHPRLQDYYVVILCPTEMDVQVRRVLQIPMWSQRVIYLQGSALKDQDLLRAKMDDAEACFILSSRCEVDRTSSDHQTILRAWAVKDFAPNCPLYVQILKPENKFHIKFADHVVCEEEFKYAMLALNCICPATSTLITLLVHTSRGQEGQQSPEQWQKMYGRCSGNEVYHIVLEESTFFAEYEGKSFTYASFHAHKKFGVCLIGVRREDNKNILLNPGPRYIMNSTDICFYINITKEENSAFKNQDQQRKSNVSRSFYHGPSRLPVHSIIASMGTVAIDLQDTSCRSASGPTLSLPTEGSKEIRRPSIAPVLEVADTSSIQTCDLLSDQSEDETTPDEEMSSNLEYAKGYPPYSPYIGSSPTFCHLLHEKVPFCCLRLDKF

SEQ ID NO: 3066 - protein, 452 aa, Homo sapiens
MPDLPHLLAFLSASRDVLPRTLLLPPPTLGPRDEHTDPVQIGRVQQDTPGKVLSIVNQLYLETHRGWGREQTPQETEPEAAQRHDPAPRNPAPHGVSWVKGPLSPEVDHPGPALASLLEEEEEDLEGKEEGREDDPEEEGPEDVLTIHVQSLVRARSSYVARQYRSLRVRIASDSGGPHGSGDPATELLQDVRHLLTDLQDHLAKDSYIRAVFGSRGPGLPKKDEDPGPALETAVCQAVLAPLKPALWTRLRTLRAPELRRLRRRQTALRAGAGPPGAQGPGPEGQSPAPALRSRIHERLAHLHAACAPRRKVALLLEVCRDVYAGLARGENQDPLGADAFLPALTEELIWSPDIGDTQLDVEFLMELLDPDELRGEAGYYLTTWFGALHHIAHYQPETDRAPRGLSSEARASLHQWHRRRTLHRKDHPRAQANLPFKEPWAEETVTGTSDN

SEQ ID NO: 3067 - protein, 306 aa, Homo sapiens
MHNLYSITGYPDPPGTMEEEEEDDDYENSTPPYKDLPPKPGTMEEEEEDDDYENSTPPYKDLPPKPGTMEEEEEDDDYENSTPPYKDLPPKPGSSAPPRPPRAAKETEKPPLPCKPRNMTGLDLAAVTCPPPQLAVNLEPSPLQPSLAATPVPWLNQRSGGPGCCQKRWMVYLCLLVVTSLFLGCLGLTVTLIKYQELMEELRMLSFQQMTWRTNMTGMAGLAGLKHDIARVRADTNQSLVELWGLLDCRRITCPEGWLPFEGKCYYFSPSTKSWDEARMFCQENYSHLVIINSFAEHLLGARGTQ

SEQ ID NO: 3068 - protein, 378 aa, Homo sapiens
MDLGKPMKSVLVVALLVIFQVCLCQDEVTDDYIGDNTTVDYTLFESLCSKKDVRNFKAWFLPIMYSIICFVGLLGNGLVVLTYIYFKRLKTMTDTYLLNLAVADILFLLTLPFWAYSAAKSWVFGVHFCKLIFAIYKMSFFSGMLLLLCISIDRYVAIVQAVSAHRHRARVLLISKLSCVGIWILATVLSIPELLYSDLQRSSSEQAMRCSLITEHVEAFITIQVAQMVIGFLVPLLAMSFCYLVIIRTLLQARNFERNKAIKVIIAVVVVFIVFQLPYNGVVLAQTVANFNITSSTCELSKQLNIAYDVTYSLACVRCCVNPFLYAFIGVKFRNDLFKLFKDLGCLSQEQLRQWSSCRHIRRSSMSVEAETTTTFSP

SEQ ID NO: 3069 - protein, 685 aa, Homo sapiens
MLLRESLGNMNCRTTMIAHISAAVGSYAETLSTIQIASRVLRMKKKKTKYTSSSSGGESSCEEGRMRRPTQLRPFHTRATVDPDFPIAHLSSDPDYSSSSEQSCDTVIYIGPNGTALSDKELTDNEGPPDFVPIVPALQKTRGDSRPAEAGEAAAGKSERDCLKCNTFAELQERLDCIDGSEEPSSFPFEELPAQFGPEQASRGPRLSQAAGASPLSESDKEDNGSEGQLTNREGPELPASKMQRSHSPVPAAAPAHSPSPASPRSVPGSSSQHSASPLVQSPSLQSSRESLNSCGFVEGKPRPMGSPRLGIASLSKTSEYKPPSSPSQRCKVYTQKGVLPSPAPLPPSSKDSGVASRESLLQPEVRTPPVGMSPQVLKKSMSAGSEGFPETPVDDEQQAATPSESKKEILSTTMVTVQQPLELNGEDELVFTLVEELTISGVLDSGRPTSIISFNSDCSARALASGSRPVSIISSISEDLECYSSTAPVSEVSITQFLPLPKMSLDEKAQDAGSRRSSISSWLSEMSAGSEGEQSCHSFIAQTCFGHGEAMAEPVASEFVSSLQNTAVVCREKPKASPDNLLILSEMGDDSFNKAAPIKGCKISTVSKAMVTISNTANLSSCEGYIPMKTNITVYPCIAMSPRNIQEPEAPTATPKAGPTLAQSRESKENSAKKEMKFEDPWLK

SEQ ID NO: 3070 - protein, 719 aa, Homo sapiens
MMQGNKKCTDAFSDSSSIGSVLDDADREVSSLTDRAFRSLCISEDTSFHDSYLAVSPDITRQVFGTFHQRTVGHTQRKSGIWSQLPSQGTEHSGWAATFQQLPKYVQGEEKYPKTSPPPTPVQRRLEVPVSGLRSSNKPVSKVSTLIKSFDRTESQRCESRPTASKPPALKNPPKFAPLPENSVNFCFDSAFLTVRRVPAEVSNTHQNSYQPGRKHGEQESSKNPEMACHGSSSFLPAANDTATLCESKFPSPHHKPVTGEPGRGKGTFLHSENSAFESWNAHQPKLLERKDTAGTVPESKAPKHYGDTTLLREPCPPERTVSPCQVQASCSQEENRLAAGALSTSIPWGCRDPGAQVFAVEGKAPSSQPDSQEKPAQPPWRKPKTGKKGKESLQDTLEEKTQTNQRGPPLYTKHNPQEQFSENNALDLPVEPNEHYDPPFNISKLLTPIIPSKHALDSADSQPAERTPSPPGQLNGYQEKEPSECQSRDSYKSKAPSLLFNLKDVRKRVKSTYSSSPLLKVLDEKTRGKVDGKQEPVSNGVILPNGLEESPPNELSKERPADDPTASHINPQKDPTADPSEPSADSYLTLSTAPTIAKAPFYVNGEAAERSSYENKEVEGELEMGPAGSSWCPDSREHRPRKHLSLRLCNRDPEPGGATEKVKTHQLENGLSRSVSQETEPEREAGLQNTHTHTHTHTHTHDHQHILSLFRSIKSRRQ

SEQ ID NO: 3071 - protein, 550 aa, Homo sapiens [sequence omitted]

SEQ ID NO: 3072 - protein, 147 aa, Homo sapiens [sequence omitted]

SEQ ID NO: 3073 - protein, 101 aa, Homo sapiens
MISAVPFILSLHSTEWSPPLHAPGAHVPRQWGTHSDYGELCPTQASPEMPTGYDCRRPVCEGHCGNSPSPPARRLQATTAGSQVLPATPRPGQGTRTPVIL

SEQ ID NO: 3074 - protein, 138 aa, Homo sapiens
MASESSPLLAYRLLGEEGVALPANGAGGPGGASARKLSTFLGVVVPTVLSMFSIVVFLRIDATGPSGLRVLPQGYGWNLLYGSLLLGLVGGVCTLGAGLYARASFLTFLLVSGSLASVLISFVAVGPRDIRLTPRPPL

SEQ ID NO: 3075 - protein, 492 aa, Homo sapiens
MATRPAGQNLQGIEDKITKMKVTMVAWDRHDNTVITAVNNMTLKVWNSYTGQLIHVLMGHEDEVFVLEPHPFDPRVLFSAGHDGNVIVWDLARGVKIRSYFNMIEGQGHGAVFDCKCSPDGQHFACTDSHGHLLIFGFGSSSKYDKIADQMFFHSDYRPLIRDANNFVLDEQTQQAPHLMPPPFLVDVDGNPHPSRYQRLVPGRENCREEQLIPQMGVTSSGLNQVLSQQANQEISPLDSMIQRLQREQDLRRSGEAGISNTSRLSRGSISSTSEVHSPPNVGLRRSGQIEGVRQMHSNAPRSEIATERDLVAWSRRVVVPELSAGVASRQEEWRTAKGEEEIKTYRSEEKRKHLTVPKENKIPTVSKNHAHEHFLDLGESKKQQTNQHNYRTRSALEETPRPSEEIENGSSSSDEGEVVAVSGGTSEEEERAWHSDGSSSDYSSDYSDWTADAGINLQPPKKVPKNKTKKAESSSDEEEESEKQKQKQIKK

SEQ ID NO: 3076 - protein, 105 aa, Homo sapiens
MYYENSYALAVLSNYDANKTGLKELPMRNLQEILHGAVRFSNNPALCNVESIQWRDIVSSDFLSNMSMDFQNHLGSCKCRIHTISASSSYGGQLYSTGAGERSHV

SEQ ID NO: 3077 - protein, 474 aa, Homo sapiens
MVSADAMVSADAMVSADAMVSADAMVSADAMVSADAMVSADAMVSADAMVSADAMVSADAMVSADAMVSADAMHTDPDYSAAYVVIETDAEDGIKGCGITFTLGKGTEVVVCAVNALAHHVLNKDLKDIVGDFRGFYRQLTSDGQLRWIGPEKGVVHLATAAVLNAVWDLWAKQEGKPVWKLLVDMDPRMLVSCIDFRYITDVLTEEDALEILQKGQIGKKEREKQMLAQGYPAYTTSCAWLGYSDDTLKQLCAQALKDGWTRFKVKVGADLQDDMRRCQIIRDMIGPEKTLMMDANQRWDVPEAVEWMSKLAKFKPLWIEEPTSPDDILGHATISKCHNRVIFKQLLQAKALQFLQIDSCRLGSVNENLSVLLMAKKFEIPVCPHAGGVGLCELVQHLIIFDYISVSASLENRVCEYVDHLHEHFKYPVMIQRASYMPPKDPGYSTEMKEESVKKHQYPDGEVWKKLLPAQEN

SEQ ID NO: 3078 - protein, 176 aa, Homo sapiens
MDTIERRLDALEHRGVLLEEKLRGGLNEGREDDMLVDWFKLIHEKHLLVRRESELIYVFKQQNLEQRQADVEYELRCLLNKPEKDWTEEDRAREKVLMQELVTLIEQRNAIINCLDEDRQREEEEDKMLEAMIKKKEFQREVEPEGKKKGKFKTMKMLKLLGNKRDAKSKSPRDKS

SEQ ID NO: 3079 - protein, 401 aa, Homo sapiens [sequence omitted]

SEQ ID NO: 3080 - protein, 363 aa, Homo sapiens
MGPGEALLAGLLVMVLAVALLSNALVLLCCAYSAELRTRASGVLLVNLSLGHLLLAALDMPFTLLGVMRGRTPSAPGACQVIGFLDTFLASNAALSVAALSADQWLAVGFPLRYAGRLRPRYAGLLLGCAWGQSLAFSGAALGCSWLGYSSAFASCSLRLPPEPERPRFAAFTATLHAVGFVLPLAVLCLTSLQVHRVARRHCQRMDTVTMKALALLADLHPSVRQRCLIQQKRRRHRATRKIGIAIATFLICFAPYVMTRLAELVPFVTVNAQWGILSKCLTYSKAVADPFTYSLLRRPFRQVLAGMVHRLLKRTPRPASTHDSSLDVAGMVHQLLKRTPRPASTHNGSVDTENDSCLQQTH

SEQ ID NO: 3081 - protein, 151 aa, Homo sapiens
MTNEEPLPKKVRLSETDFKVMARDELILRWKQYEAYVQALEGKYTDLNSNDVTGLRESEEKLKQQQQESARRENILVMRLATKEQEMQECTTQIQYLKQVQQPSVAQLRSTMVDPAINLFFLKMKGELEQTKDKLEQAQNELSAWKFTPDR

SEQ ID NO: 3082 - protein, 100 aa, Homo sapiens [sequence omitted]

SEQ ID NO: 3083 - protein, 108 aa, Homo sapiens
MKMIDKYASEDAELLLVGNKLDCETDREITRQQGEKFAQQITGMRFCEASAKDNFNVDEIFLKLVDDILKKMPLDILRNELSNSILSLQPEPEIPPELPPPRPHVRCC

SEQ ID NO: 3084 - protein, 207 aa, Homo sapiens [sequence omitted]

SEQ ID NO: 3085 - protein, 1204 aa, Homo sapiens
MYVTMMMTDQIPLELPPLLNGEVAMMPHLVNGDAAQQVILVQVNPGETFTIRAEDGTLQCIQGPAEVPMMSPNGSIPPIHVPPGYISQVIEDSTGVRRVVVTPQSPECYPPSYPSAMSPTHHLPPYLTHHPHFIHNSHTAYYPPVTGPGDMPPQFFPQHHLPHTIYGEQEIIPFYGMSSYITREDQYSKPPHKKLKDRQIDRQNRLNSPPSSIYKSSCTTVYNGYGKGHSGGSGGGGSGSGPGIKKTERRARSSPKSNDSDLQEYELEVKRVQDILSGIEKPQVSNIQARAVVLSWAPPVGLSCGPHSGLSFPYSYEVALSDKGRDGKYKIIYSGEELECNLKDLRPATDYHVRVYAMYNSVKGSCSEPVSFTTHSCAPECPFPPKLAHRSKSSLTLQWKAPIDNGSKITNYLLEWDEGKRNSGFRQCFFGSQKHCKLTKLCPAMGYTFRLAARNDIGTSGYSQEVVCYTLGNIPQMPSAPRLVRAGITWVTLQWSKPEGCSPEEVITYTLEIQEDENDNLFHPKYTGEDLTCTVKNLKRSTQYKFRLTASNTEGKSCPSEVLVCTTSPDRPGPPTRPLVKGPVTSHGFSVKWDPPKDNGGSEILKYLLEITDGNSEANQWEVAYSGSATEYTFTHLKPGTLYKLRACCISTGGHSQCSESLPVRTLSIAPGQCRPPRVLGRPKHKEVHLEWDVPASESGCEVSEYSVEMTEPEDVASEVYHGPELECTVGNLLPGTVYRFRVRALNDGGYGPYSDVSEITTAAGPPGQCKAPCISCTPDGCVLVGWESPDSSGADISEYRLEWGEDEESLELIYHGTDTRFEIRDLLPAAQYCCRLQAFNQAGAGPYSELVLCQTPASAPDPVSTLCVLEEEPLDAYPDSPSACLVLNWEEPCNNGSEILAYTIDLGDTSITVGNTTMHVMKDLLPETTYRIRIQAINEIGAGPFSQFIKAKTRPLPPLPPRLECAAAGPQSLKLKWGDSNSKTHAAEDIVYTLQLEDRNKRFISIYRGPSHTYKVQRLTEFTCYSFRIQAASEAGEGPFSETYTFSTTKSVPPTIKAPRVTQLEGNSCEILWETVPSMKGDPVNYILQVLVGRESEYKQVYKGEEATFQISGLQTNTDYRFRVCACRRCLDTSQELSGAFSPSAAFVLQRSEVMLTGDMGSLDDPKMKSMMPTDEQFAAIIVLGFATLSILFAFILQYFLMK

SEQ ID NO: 3086 - protein, 129 aa, Homo sapiens [sequence omitted]

SEQ ID NO: 3087 - protein, 280 aa, Homo sapiens
METHHGICSRLCKESDSVVLAVGYRKLPKHKFPVPVRDCLVATIHFLKSLDAYGVDPARVVVCGDSFGGAIAAVVCQQLVDRPDLPRIRAQILIYAILQALDLQTPSFQQRKNIPLLTWSFICYFFFQNLDFSSSWQEVIMKGAHLPAEVWEKYRKWLGPENIPERFKERGYQLKPHEPMNEAAYLEVSVVLDVMCSPLIAEDDIVSQLPETCIVSCEYDALRDNSLLYKKRLEDLGVPVTWHHMEDGFHGVLRTIDMSFLHFPCSMRILSALVQFVKGL

SEQ ID NO: 3088 - protein, 317 aa, Homo sapiens
METNCRKLVSACVQLGVQPAAVECLFSKDSEIKKVEFTDSPESRKEAASSKFFPRQHPGANEKDKSQQGKNEDVGAEDPSKKKRQRRQRTHFTSQQLQELEATFQRNRYPDMSTREEIAVWTNLTEARVRVWFKNRRAKWRKRERNQQAELCKNGFGPQFNGLMQPYDDMYPGYSYNNWAAKGLTSASLSTKSFPFFNSMNVNPLSSQSMFSPPNSISSMSMSSSMVPSAVTGVPGSSLNSLNNLNNLSSPSLNSAVPTPACPYAPPTPPYVYRDTCNSSLASLRLKAKQHSSFGYASVQNPASNLSACQYAVDRPV

SEQ ID NO: 3089 - protein, 190 aa, Homo sapiens [sequence omitted]

SEQ ID NO: 3090 - protein, 187 aa, Homo sapiens [sequence omitted]

SEQ ID NO: 3091 - protein, 328 aa, Homo sapiens
MARTVVLITGCSSGIGLHLAVRLASDPSQSFKVYATLRDLKTQGRLWEAARALACPPGSLETLQLDVRDSKSVAAARERVTEGRVDVLVCNAGLGLLGPLEALGEDAVASVLDVNVVGTVRMLQAFLPDMKRRGSGRVLVTGSVGGLMGLPFNDVYCASKFALEGLCESLAVLLLPFGVHLSLIECGPVHTAFMEKVLGSPEEVLDRTDIHTFHRFYQYLAHSKQVFREAAQNPEEVAEVFLTALRAPKPTLRYFTTERFLPLLRMRLDDPSGSNYVTAMHREVFGDVPAKAEAGAEAGGGAGPGAEDEAGRSAVGDPELGDPPAAPQ

SEQ ID NO: 3092 - protein, 847 aa, Homo sapiens [sequence omitted]

SEQ ID NO: 3093 - protein, 220 aa, Homo sapiens
MLQLAGVSNSTCGGVRNVSVETRNVKPQGKDSKAEENGSHSFMHSMDPQLERQMETTQNLVDSYMAIVNKTVWDLMVGAKPKTTMHIMIYNVHAPPHGDQGVHLLGAAVQPALAWEREDTHGGVGRVGTAARRDAASQSCCPTCTRLGTRRHSWRSRQSRHSGATRLAWEEIDTPGGVGRAGTAARRDSRGNEKTLLEESAEQADQGVHLLGAAVQPALA

SEQ ID NO: 3094 - protein, 1345 aa, Homo sapiens
MLYNQPDQKYDEENLPIPNSLRCELLLVLKTQWPFDPEFWDWKTLKRQCLALMGEEASIVSSIDELNDSEVYEKVVDYQEESKETSMNGLSGGVGANSGLLKDIGDEKQKKREIKQLRERGFISARFRNWQAYMQYCVLCDKEFLGHRIVRHAQKHYKDGIYSCPICAKNFNSKETFVPHVTLHVKQSSKERLAAMKPLRRLGRPPKITTTNENQKTNTVAKQEQRPIKKNSLYSTDFIVFNDNDGSDDENDDKDKSYEPEVIPVQKPVPVNEFNCPVTFCKKGFKYFKNLIAHVKGHKDNEDAKRFLEMQSKKVICQYCRRHFVSVTHLNDHLQMHCGSKPYICIQMKCKAGFNSYAELLTHRKEHQVFRAKCMFPKCGRIFSEAYLLYDHEAQHYNTYTCKFTGCGKVYRSQGELEKHLDDHSTPPEKVLPPEAQLNSSGDSIQPSEVNQNTAENIEKERSMLPSENNIENSLLADRSDAWDKSKAESAVTKQDQISASELRQANGPLSNGLENPATTPLLQSSEVAVSIKVSLNQGIEDNFGKQENSTVEGSGEALVTDLHTPVEDTCNDLCHPGFQERKEQDCFNDAHVTQNSLVNSETLKIGDLTPQNLERQVNNLMTFSVQNQAAFQNNLPTSKFECGDNVKTSSNLYNLPLKTLESIAFVPPQSDLSNSLGTPSVPPKAPVQKFSCQVEGCTRTYNSSQSIGKHMKTAHPDQYAAFKMQRKSKKGQKANNLNTPNNGKFVYFLPSPVNSSNPFFTSQTKANGNPACSAQLQHVSPPIFPAHLASVSTPLLSSMESVINPNITSQDKNEQGGMLCSQMENLPSTALPAQMEDLTKTVLPLNIDSGSDPFLPLPAESSSMSLFPSPADSGTNSVFSQLENNTNHYSSQIEGNTNSSFLKGGNGENAVFPSQVNVANNFSSTNAQQSAPEKVKKDRGRGPNGKERKPKHNKRAKWPAIIRDGKFICSRCYRAFTNPRSLGGHLSKRSYCKPLDGAEIAQELLQSNGQPSLLASMILSTNAVNLQQPQQSTFNPEACFKDPSFLQLLAENRSPAFLPNTFPRSGVTNFNTSVSQEGSEIIKQALETAGIPSTFEGAEMLSHVSTGCVSDASQVNATVMPNPTVPPLLHTVCHPNTLLTNQNRTSNSKTSSIEECSSLPVFPTNDLLLKTVENGLCSSSFPNSGGPSQNFTSNSSRVSVISGPQNTRSSHLNKKGNSASKRRKKVAPPLIAPNASQNLVTSDLTTMGLIAKSVEIPTTNLHSNVIPTCEPQSLVENLTQKLNNVNNQLFMTDVKENFKTSLESHTVLAPLTLKTENGDSQMMALNSCTTSINSDLQISEDNVI

SEQ ID NO: 3095 - protein, 129 aa, Homo sapiens
MNPCIFLFSNMAFEVLNLRSRNHAFLLICRASLELPPPAVKGACRPGRLSPGAWLEVAGAGTGRALAGVVVGSSALLPWLPLLNPPLTFVGSCSVRRELGALAPRLLSSQEDLPHRHQWLLLWPREVGL

SEQ ID NO: 3096 - protein, 168 aa, Homo sapiens
MCGPPYASATHQPSPCPSSGIALVEGKKGRAGWWVENTSVHQAGPACCVPPRCCPPTPQQSSEGPPGGDLGHNRLPTQTPSYPCRGHPAPPRHCYAIAGGVYVSCTAQHHADDVLHPLLPAGHRAPQTKEPAQGAHGELAVSKGDLWWGLLPELVQPLLQTVSARDPQ

SEQ ID NO: 3097 - protein, 124 aa, Homo sapiens
MGFKIALDDEGTAGGWLFWDDGQSIDTYGKGLYYLASFSASQNTMQSHIIFNNYITGTNPLKLGYIEIWGVGSVPVTSVSISVSGMVITPSFNNDPTAQVLSIDVTDRNISLHNFTSLTWISTL

SEQ ID NO: 3098 - protein, 133 aa, Homo sapiens
MEARLQVDSIGSHSSWHVEYYLHISLWKHSRLYRGQAWSLPSHQFCVELPSLKMVNCFLLAFILSGSLTFRTLFSVSNLFISQDPRLSYLHVHCKCNVNESSDKIFLYFVISKEFLYRRTQWGLACTSTIVSE

SEQ ID NO: 3099 - protein, 150 aa, Homo sapiens
MLILTPFQGQGHGAQLLETVHRYYTEFPTVLDITAEDPSKSYVKLRDFVLVKLCQDLPCFSREKLMQGFNEDMAIEAQQKFKINKQHARRVYEILRLLVTDMSDAEQYRSYRLDIKRRLISPYKVGLSRILNTVFFSLFKTEEKLPNISI

SEQ ID NO: 3100 - protein, 322 aa, Homo sapiens
MKRRMFPRPCLARMPGSRGSGSTPDGNRKCCRFEHLLIAHPGSRGSRVLVDARDKLGIPWQYSENEKHGMFLMAFENKAGLPVEPATFQLYVPALSALWRDSGIREAFSRRSEFQLGESVKYFLDNLDRIGQLNYFPSKQDILLARKATKGIVEHDFVIKKIPFKMVDVGGQRSQRQKWFQCFDGITSILFMVSSSEYDQVLMEDRRTNRLVESMNIFETIVNNKLFFNVSIILFLNKMDLLVEKVKTVSIKKHFPDFRGDPHRLEDVQRYLVQCFDRKRRNRSKPLFHHFTTAIDTENVRFVFHAVKDTILQENLKDIMLQ

SEQ ID NO: 3101 - protein, 110 aa, Homo sapiens [sequence omitted]

SEQ ID NO: 3102 - protein, 260 aa, Homo sapiens [sequence omitted]

SEQ ID NO: 3103 - protein, 483 aa, Homo sapiens
MGNQSSVPQDSPLGCILRNWDKFDPQALKRKRLVFLCNTVWPKYELEGQEAWPVGGSLNVNTILQLDVYCRQQRKWSEVPYVQTFMILRENPDFCKGCKIDPALLAILSRPLQRPQPGGFNDFLVNPPQPPLPETKEKEQAPPAPSSLYRTLSLHGSASTYTRPSGPRSGICLLPVVSRPVGPVQVQVPFSMQDLSQVKEGLGKFSENPGKFLEGFRKLTLTFELTWKDVAILLGQTLSLEERQTIWEAARQCGDELHLADANYPVGATAVPLQDPNWDYDTPAGICARNHMLLCLIEGMKRSQVKPVNYNKLATIDQGPHENPTAFLERLQETLIKHTNLDPGSPEGQLVLKDHFLTQAAPDIRRKLRMLALGTRAPMSEILKFASSVFYNRDQDERDRAERKEKQKEERQAQLLAALQVHQPPPGCPKDTFPGNCYQCGKPGHWKANCPYGPRGEKPCTACPLCRKLRYWKENCPESQKGP

SEQ ID NO: 3104 - protein, 129 aa, Homo sapiens
MIKWVSYQGMQGWFNILKPIIVVHHISRMKNGNHMIISIDARKGFDKIQHPFMMKTLSKIGIEGTYLKVIKAIYHKSTANIILNGEMLKAFPLRTGTRQGCLLSPLLFSIVLEVLARAIRERKKAHPNR

SEQ ID NO: 3105 - protein, 158 aa, Homo sapiens [sequence omitted]

SEQ ID NO: 3106 - protein, 394 aa, Homo sapiens
MFSEDDFQSTERAPYGPQLQWSQDLPRVQVFREQANLEDRSPRRTQRITGGEQVLWGPITQIFPTVRPADLTRVIMPLEQRSQHCKPEEGLQAQEEDLGLVGAQALQAEEQEAAFFSSTLNVGTLEELPAAESPSPPQSPQEESFSPTAMDAIFGSLSDEGSGSQEKEGPSTSPDLIDPESFSQDILHDKIIDLVHLLLRKYRVKGLITKAEMLGSVIKNYEDYFPEIFREASVCMQLLFGIDVKEVDPTSHSYVLVTSLNLSYDGIQCNEQSMPKSGLLIIVLGVIFMEGNCIPEEVMWEVLSIMGVYAGREHFLFGEPKRLLTQNWVQEKYLVYRQVPGTDPACYEFLWGPRAHAETSKMKVLEYIANANGRDPTSYPSLYEDALREEGEGV

SEQ ID NO: 3107 - protein, 376 aa, Homo sapiens
MLTAVCGSLGSQHTEAPHASPPRLDLQPLQTYQGHTSPEAGDYPSPLQPGELQSLPLGPEVDFSQGYELPGASSRVTCEDLESDSPLAPGPFSKLLQPDMSHHYESWFRPTHPGAEDGSWWDLHPGTSWMDLPHTQGALTSPGHPGALQAGLGGYVGDHQLCAPPPHPHAHHLLPAAGGQHLLGPPDGAKALEVAAPESQGLDSSLDGAARPKGSRRSVPRSSGQTVCRCPNCLEAERLGAPCGPDGGKKKHLHNCHIPGCGKAYAKTSHLKAHLRWHSGDRPFVCNWLFCGKRFTRSDELQRHLQTHTGTKKFPCAVCSRVFMRSDHLAKHMKTHEGAKEEAAGAASGEGKAGGAVEPPGGKGKREAEGSVAPSN

SEQ ID NO: 3108 - protein, 396 aa, Homo sapiens
MAGVDLEWPQRRSQDTSEAREPAPKRWKVSCEIPDRLLLVTSGKLCQPGAYVWARHQRGLAAPRERARVPRFTTTLAPCLRPDPPPHVGCLLGLLQASESGGRSFPRVSALPSQVPKASPAHVRRCPFGRPRVGWLGWGAVASLSALPLPPPQLSIPNARSSPGCVCAGWGLLRESCRGGCPPPILTLHPRRERSKVPYIVRQCVEEVEKRGIEEVGIYRISGVATDIQALKAVFDANNKDILLMLSDMDINAIAGTLKLYFRELPEPLLTDRLYPAFMEGIALSDPAAKENCMMHLLRSLPDPNLITFLFLLEHLERVAEKEPINKMSLHNLATVFGPTLLRPSEVESKAHLTSAADIWSHDVMAQVQVLLYYLQHPPISFAELKRNTLYFSTDV

SEQ ID NO: 3109 - protein, 122 aa, Homo sapiens [sequence omitted]

SEQ ID NO: 3110 - protein, 202 aa, Homo sapiens
MVRIWTTIMIVLILLLRIGPNKPSLSGRQAPAQAQTSDLVPSLFPLGLWAPGFCTWSSPDEDKVWRPAWEQGPKGEPDPRGLRPRKPVPGTGNRDSGTRRRLQDATEQDPRPGNDVASAETAGPPSPSGIRAQDRAPRHRRAPPARMPVAPAPSADGEPLQEQGGGLFHRTRSVYNGLELNTWMKVERLFVEKFHQSFSLDN

SEQ ID NO: 3111 - protein, 337 aa, Homo sapiens
MALHVAARYGHADVAQLLCSFGSNPNIQDKEEETPLHCAAWHGHYSVAKALCEAGCNVNIKNREGETPLLTASARGYHDIVECLAEHGADLNACDKDGHIALHLAVRRCQMEVIKTLLSQGCFVDYQDRHGNTPLHVACKDGNMPIVVALCEANCNLDISNKYGRTPLHLAANNGILDVVRYLCLMGASVEALTTDGKTAEDLARSEQHEHVAGLLARLRKDTHRGLFIQQLRPTQNLQPRIKLKLFGHSGSGKTTLVESLKCGLLRSFFRRRRPRLSSTNSSRFPPSPLASKPTGRNLHAGPVSPAGVGFRTLSFQGLGGKGVVFGSLGLYWTLWP

SEQ ID NO: 3112 - protein, 749 aa, Homo sapiens
MVQRSPPGPRAAALKAGDDGSAPAALLLALAGALLAPCEARGVSLWNQGRADEVVSASVRSGDLWIPVKSFDSKNHPEVLNIRLQRESKELIINLERNEGLIASSFTETHYLQDGTDVSLARNYTGHCYYHGHVRGYSDSAVSLSTCSGLRGLIVFENESYVLEPMKSATNRYKLFPAKKLKSVRGSCGSHHNTPNLAAKNVFPPPSQTWARRHKRETLKATKYVELVIVADNREFQRQGKDLEKVKQRLIEIANHVDKFYRPLNIRIVLVGVEVWNDMDKCSVSQDPFTSLHEFLDWRKMKLLPRKSHDNAQLVSGVYFQGTTIGMAPIMSMCTADQSGGIVMDHSDNPLGAAVTLAHELGHNFGMNHDTLDRGCSCQMAVEKGGCIMNASTGYPFPMVFSSCSRKDLETSLEKGMGVCLFNLPEVRESFGGQKCGNRFVEEGEECDCGEPEECMNRCCNATTCTLKPDAVCAHGLCCEDCQLKPAGTACRDSSNSCDLPEFCTGASPHCPANVYLHDGHSCQDVDGYCYNGICQTHEQQCVTLWGPGAKPAPGICFERVNSAGDPYGNCGKVSKSSFAKCEMRDAKCGKIQCQGGASRPVIGTNAVSIETNIPLQQGGRILCRGTHVYLGDDMPDPGLVLAGTKCADGKICLNRQCQNISVFGVHECAMQCHGRGVCNNRKNCHCEAHWAPPFCDKFGFGGSTDSGPIRQAGKEARQEAAESNRERGQGQEPVGSQEHASTASLTLI

SEQ ID NO: 3113 - protein, 201 aa, Homo sapiens
MLVLASNLPEQFDCAINSRIDVMVHFDLPQQEERERLVRLHFDNCVLRPATEGKRRLKLAQFDYGRKCSEVARLTEGMSGREIAQLAVSWQATAYASKDGVLTEAMMDACVQDAVQQYRQKMRWLKAEGPGRGVEHPLPGVQGETLTSWSLATDPSYPCLAGPCTFRICSWMGTGLCPGPLSPRMSCGGGRPFCPPGHPLL

SEQ ID NO: 3114 - protein, 116 aa, Homo sapiens [sequence omitted]

SEQ ID NO: 3115 - protein, 131 aa, Homo sapiens [sequence omitted]

SEQ ID NO: 3116 - protein, 196 aa, Homo sapiens
MEWARMITEAEGSYTLSSASWKGRRVCAAALARAWRPENQARRRQHTSSLRAREGQCSSSSRQAEGGFSLHLCVLLRSSMGWMRPIHIARASASLNPPSYLLLLDAVRLQRRCSLEGSCPTVCAGARMSALVQPCTPESEALTLGSIKKVIWPPHKAKTFTLAFVRNSFLKLDSLAMFKPLNSSIELSSGNHATVI

SEQ ID NO: 3117 - protein, 108 aa, Homo sapiens [sequence omitted]

SEQ ID NO: 3118 - protein, 236 aa, Homo sapiens
MCKMPAAPEWQWRVSGCVRCPGRSLRAALCEVGSLGPGSLEAELRWGFLFMRLEVLPKKLLPAPTPSQGGTDHGQLSLAGGTPSCRGGAVALKGPGQDQQFSWQWCVCPHFADEETEAWKDPGPCPGPTPHPGGAALESCATSLFSPGGGPCLLRPATPSPCCRQEDTAGAPGSLSRSWAREPSSISEPAMGCPLTFRSHVPLRWSSASGPPSTLKAPVITWPTRQSRWPPSKVSR

SEQ ID NO: 3119 - protein, 148 aa, Homo sapiens
MRRLSIVMKNPWHSPHPQTHGSHSHTGPKATVSAAVAPVDIGKPGEGVEEISWPPAGSLGFCAQGSWSPKNFQKLTPHVPILLGFLDFSEAPAEGSRCSLECRGSPLTWLLESLLFLLLLPSSSSSSLSISPSLCPSPVPDLAIPGCP

SEQ ID NO: 3120 - protein, 139 aa, Homo sapiens [sequence omitted]

SEQ ID NO: 3121 - protein, 204 aa, Homo sapiens [sequence omitted]

SEQ ID NO: 3122 - protein, 923 aa, Homo sapiens
MAASTGYVRLWGAARCWVLRRPMLAAAGGRVPTAAGAWLLRGQRTCDASPPWALWGRGPAIGGSAGAGEGPVITALTPMTIPDVFPHLPLIAITRNPVFPRFIKIIEVKNKKLVELLRRKVRLAQPYVGVFLKRDDSNESDVVESLDEIYHTGTFAQIHEMQDLGDKLRMIVMGHRRVHISRQLEVEPEEPEAENKHKPRRKSKRGKKEAEDELSARHPAELAMEPTPELPAEVLMVEVENVVHEDFQVTEEVKALTAEIVKTIRDIIALNPLYRESVLQMMQAGQRVVDNPIYLSDMGAALTGAESHELQDVLEETNIPKRLYKALSLLKKEFELSKLQQRLGREVEEKIKQTHRKYLLQEQLKIIKKELGLEKDDKDAIEEKFRERLKELVVPKHVMDVVDEELSKLGLLDNHSSEFNVTRNYLDWLTSIPWGKYSNENLDLARAQAVLEEDHYGMEDVKKRILEFIAVSQLRGSTQGKILCFYGPPGVGKTSIARSIARALNREYFRFSVGGMTDVAEIKGHRRTYVGAMPGKIIQCLKKTKTENPLILIDEVDKIGRGYQGDPSSALLELLDPEQNANFLDHYLDVPVDLSKVLFICTANVTDTIPEPLRDRMEMINVSGYVAQEKLAIAERYLVPQARALCGLDESKAKLSSDVLTLLIKQYCRESGVRNLQKQVEKVLRKSAYKIVSGEAESVEVTPENLQDFVGKPVFTVERMYDVTPPGVVMGLAWTAMGGSTLFVETSLRRPQDKDAKGDKDGSLEVTGQLGEVMKESARIAYTFARAFLMQHAPANDYLVTSHIHLHVPEGATPKDGPSAGCTIVTALLSLAMGRPVRQNLAMTGEVSLTGKILPVGGIKEKTIAAKRAGVTCIVLPAENKKDFYDLAAFITEGLEVHFVEHYREIFDIAFPDEQAEALAVER

SEQ ID NO: 3123 - protein, 1533 aa, Homo sapiens
MMQLTLNTLFPVVSTPAITYIVTVFTGDVRGAGTKSKIYLVMYGARGNKNSGKIFLEGGVFDRGRTDIFHIELAVLLSPLSRVSVGHGNVGVNRGWFCEKVVILCPFTGIQQTFPCSNWLDEKKADGLIERQLYEMVSLRKKRLKKFPWSLWVWTTDLKKAGTNSPIFIQIYGQKGRTDEILLNPNNKWFKPGIIEKFRIELPDLGRFYKIRVWHDKRSSGSGWHLERMTLMNTLNKDKYNFNCNRWLDANEDDNEIVREMTAEGPTVRRIMGMARYHVTVCTGELEGAGTDANVYLCLFGDVGDTGERLLYNCRNNTDLFEKGNADEFTIESVTMRNVRRVRIRHDGKDSGSGWYLDRVLVREEGQPESDNVEFPCLRWLDKDKDDGQLVRELLPSDSSATLKNFRYHISLKTGDVSGASTDSRVYIKLYGDKSDTIKQVLLVSDNNLKDYFERGRVDEFTLETLNIGNINRLVIGHDSTGMHVSWFLGSVQIRVPRQGKQYTFPANRWLDKNQADGRLEVELYPSEVVEIQKLVHYEVEIWTGDVGGAGTSARVYMQIYGEKGKTEVLFLSSRSKVFERASKDTFQLEAADVGEVYKLRLGHTGEGFGPSWFVDTVWLRHLVVREVDLTPEEEARKKKEKDKLRQLLKKERLKAKLQRKKKKRKGSDEEDEGEEEESSSSEESSTEEEEMEEEEEEEEFGPGMQEVIEQHKFEAHRWLARGKEDNELVVELVPAGKPGPERNTYEVQVVTGNVPKAGTDANGYLTIYGEEYGDTGERPLKKSDKSNKFEQGQTDTFTIYAIDLGALTKIRIRHDNTGNRAGWFLDRIDITDMNNEITYYFPCQRWLAVEEDDGQLSRELLPVDESYVLPQSEEGGGGGDNNPLDNLALEQKDQSTTFSVTIKTGVKKNAGTDANVFITLFGTQDDTGMTLLKSSKTNSDKFERDSIEIFTVETLDLGDLWKVRLGHDNTGKAPGWFVDWVEVDAPSLGKCMTFPCGRWLAKNEDDGSIIRDLFHAELQTRLYTPFVPYEITLYTSDVFAAGTDANIFIIIYGCDAVCTQQKYLCTNKREQKQFFERKSASRFIVELEDVGEIIEKIRIGHNNTGMNPGWHCSHVDIRRLLPDKDGAETLTFPCDRWLATSEDDKKTIRELVPYDIFTEKYMKDGSLRQVYKEVEEPLDIVLYSVQIFTGNIPGAGTDAKVYITIYGDLGDTGERYLGKSENRTNKFERGTADTFIIEAADLGVIYKIKLRHDNSKWCADWYVEKVEIWNDTNEDEFLFLCGRWLSLKKEDGRLERLFYEKEYTGDRSSNCSSPADFWEIALSSKMADVDISTVTGPMADYVQEGPIIPYYVSVTTGKHKDAATDSRAFIFLIGEDDERSKRIWLDYPRGKRGFSRGSVEEFYVAGLDVGIIKKIEVLYEMTVWTGDVVGGGTDSNIFMTLYGINGSTEEMQLDKRKARFEREQNDTFIMEILDIAPFTKMRIRIDGLGSRPEWFLERVKCLDPHSSFQPPPTPSPGSSGLSMDLVKAQMSL

SEQ ID NO: 3124 - protein, 260 aa, Homo sapiens
METSPRLGVMEKAKSLKSTHAHFFFFFDTESCSVAQAGAQWCNLSSLQPPPPELKGFFCLSLLTSWDYRHAPPRPANFCIFSRDGVSPGWSRTSDLRWSTHLCLPKCWDYRREPLHPATHALFKKPHDTSVFVHTDPEKDNSLADHRSTSEKGTVPGDGQTKEGAVTCQKSLSNHSPTPESGSLSTVPPCLPSEDAANLRPWEHPPRGSIHAPSVKSSGNKQPWKSTRQSTHVEEIGLVPLAEEPLCRHVLQLLPRDTAA

SEQ ID NO: 3125 - protein, 174 aa, Homo sapiens
MADEQRAGFSPCGSLSLTVLGGCFLSCCPWESDSRFFSLWPLGLSGLGGLTRSTRWASLVWGPGTWRSPAASVRPVLGVALKRQPVPQVSSLHTRLIACWFRPSAGFSLPLSNSHTAERAYGRDEAVHSKNILILRITSPPGITGVLKKCCDTSEHREIHGHFQIMEDSRRNFN

SEQ ID NO: 3126 - protein, 1075 aa, Homo sapiens [sequence omitted]

SEQ ID NO: 3127 - protein, 952 aa, Homo sapiens [sequence omitted]

SEQ ID NO: 3128 - protein, 209 aa, Homo sapiens
MSNLKPDGEHGGSTGTGSGAGSGGALEEEVRTLFVSGLPVDIKPRELYLLFRPFKGYEGSLIKLTARQPVGFVIFDSRAGAEAAKNALNGIRFDPENPQTLRLEFAKANTKMAKSKLMATPNPSNVHPALGAHFIARDPYDLMGAALIPASPEAWAPYPLYTTELTPAISHAAFTYPTATAAAAALHAQVRWYPSSDTTQQGWKYRQFC

SEQ ID NO: 3129 - protein, 404 aa, Homo sapiens
MSPRFVPMWSARLLTRAHVECPPAHTCPCGVPACSCAHVECPPAHTCRCGVPTCSHMPMWSARLLTRAHVECPPAHTRVHVECPPAHVPMWSAHLLTCADVECRLLTHVPMWSARLLTRADAECPPAHTCRCGVPACSHVPMRSARLLTRAHAECPPAHTCRRGVPACSHVPTRSARLLTRADAECPPAHTCRRGVPACSHVPMWSARLLTCRCGVPACSHVPMWGARLLTCRCGVPACSHVPTWGARLLTRAHVECPPAHTCRRGVPACSRAHMECPPAHTCHCGVPACSHTCRCGVPACSHVPMWSARLLTRAHVECPPAHTRAHVECPPAHTCPCGVPACSHTCPCGVPACSHKALAWWFCRFPVLPAESDAVTVHSTHGGFLIRFYVKDPFYISLHLEIT

SEQ ID NO: 3130 - protein, 157 aa, Homo sapiens
MGMLAFPPDTHISPYKDLLDPARWRMLIQQFRYDNYRLHQLGNNSVFTLTLQAGLSAIKTPQCYKEDGSSKSPDCPVCSRSLNKLAQPLPMAHCANSRLVCKISGDVMNENNPPMMLPNGYVYGYNSLLSIRQDDKVVCPRTKEVFHFSQAEKVYIM

SEQ ID NO: 3131 - protein, 101 aa, Homo sapiens
MFSGSSKSPMEFLNSSDPKTASCETLLETCLSLSLFFLRQYLALSPRLECSGMILAHCSLCLLDSRDFSHLSLLSSWDCRCASPSPAKFFCRDMVSTFCPG

SEQ ID NO: 3132 - protein, 109 aa, Homo sapiens
MPGLVLFPGLFPLFQFSRLLTLALCPVFHCDPDLWTWQRNFISLTLILGISLHSPQPHLIRTSPSWSSTFPQFILPSLPDHAIPFDKDIHTGTDLGYLGKEAKEPVRSL

SEQ ID NO: 3133 - protein, 125 aa, Homo sapiens
MEPDFLHSVGVKLPHTPPNTCPRASPSHPPSQGRRDPVPVEVGKPSRVQKAEAMAQSGGAAFWGSALGLQTQGAEMLAAGPPTRARQPALPGELRGAEVPGEAAPGARALPDLGNRQSGAPGSKS

SEQ ID NO: 3134 - protein, 609 aa, Homo sapiens [sequence omitted]

SEQ ID NO: 3135 - protein, 146 aa, Homo sapiens
MGPRLAATAAAATPAVRTVPQYKYAAGVCNPQQHLNAQPQVTVQQPAIHVQGQEPLTVSMLASAPQEQKQMLGEWLFPLIQAMHPTLAGKITGVLLEIDNSELLHMLKSPESLHSKVDEAVAVLQAHQAKETAQKAVNSATGVPTV

SEQ ID NO: 3136 - protein, 803 aa, Homo sapiens [sequence omitted]

SEQ ID NO: 3137 - protein, 369 aa, Homo sapiens [sequence omitted]

SEQ ID NO: 3138 - protein, 114 aa, Homo sapiens [sequence omitted]

SEQ ID NO: 3139 - protein, 291 aa, Homo sapiens [sequence omitted]

SEQ ID NO: 3140 - protein, 107 aa, Homo sapiens [sequence omitted]

SEQ ID NO: 3141 - protein, 112 aa, Homo sapiens
MLSAPHGRWPLPEDGGRGDVGHSRLFFLPLQCLFQLYEVKTSLAGSRETDLCRWFKGRSSRVHSSQGCQSGLCRKLNSLKEYMKTEPQPRRNGQIPRHIKEFLDKLSKLNHD

SEQ ID NO: 3142 - protein, 154 aa, Homo sapiens
MRVPRHPGGSHRSAVGLLCEKGPAAPSLVQIRCQTVFLGIHPNRSLISLCGSPGPPSRPEPKCLGSRERPVPFFSSLATSSHFRLLTVPKQPPKTLRELGPGPEAENGRKKRSGRFIKLSLQILQYRHCLLSSLWMVCTHPCLQVFRKNAQELF

SEQ ID NO: 3143 - protein, 468 aa, Homo sapiens
MEHDGQSLVKSTIFISPSSVKKEEAPQSEAPRVEECHHGRTPTCSRLAPPPMSQSTCSLHSIHSEWQERPLCEHTRTLSTHSVPNISGATCSAFASPFGCPYSHRHATYPYRVCSVNPPSAIEMQLRRVLHDIRNSLQNLSQYPMMRGPDPAAAPYSTQKSSVLPLYENTFQELQVMRRSLNLFRTQMMDLELAMLRQQTMVYHHMTEEERFEVDQLQGLRNSVRMELQDLELQLEERLLGLEEQLRAVRMPSPFRSSALMGMCGSRSADNLSCPSPLNVTELMQEQSYLKSELGLGLGEMGFEIPPGESSESVFSQATSESSSVCSGPSHANRRTGVPSTASVGKSKTPLVARKKVFRASVALTPTAPSRTGSVQTPPDLESSEEVDAAEGAPEVVGPKSEVEEGHGKLPSMPAAEEMHKNVEQDELQQVIREIKESIVGEIRREIVSGLLAAVSSSKASNSKQDYH

SEQ ID NO: 3144 - protein, 163 aa, Homo sapiens
MGRVSGLVPSRFLTLLAHLVVVITLFWSRVRPTAALNPSPFPSLSGPSPTLPPPSVLPSWVFLFPAAPRPALQPAPFSLLSAGWWPRSLSPWASLQWSWPVSSQESPCSTAPRASSVSFLPAHLSHTTHFYQDSLQPPDTIVSAVANPSSSKIFNDVLNPAVY

SEQ ID NO: 3145 - protein, 650 aa, Homo sapiens
MTMRERNQIFHEVPLKFMMSKNTSVPVSAVFMDKPEEFISEMDMSCEVNECRKIESLENLYLDFDDDVTELETFGVTTTKVSKSPSPASTSTVPNMTDAPTAPKAGTTTVAPSAPDISANSRSLSQILMEQLQKEKQLVTGMDGGPEECKNKDDQGFESCEKVSNSDKPLIQDSDLKTSDALQLENSQEIETSNKNDMTIDILHADGERPNVLENLDNSKEKTVGSEAAKTEDTVLCSSDTDEECLIIDTECKNNSDGKTAVVGSNLSSRPASPNSSSGQASVGNQTNTACSPEESCVLKKPIKRVYKKFDPVGEILKMQDELLKPISRKVPELPLMNLENSKQPSVSEQLSGPSDSSSWPKSGWPSAFQKPKGRLPYELQDYVEDTSEYLAPQEGNFVYKLFSLQDLLLLVRCSVQRIETRPRSKKRKKIRRQFPVYVLPKVEYQACYGVEALTESELCRLWTESLLHSNSSFYVGHIDAFTSKLFLLEEITSEELKEKLSALKISNLFNILQHILKKLSSLQEGSYLLSHAAEDSSLLIYKASDGKVTRTAYNLYKTHCGLPGVPSSLSVPWVPLDPSLLLPYHIHHGRIPCTFPPKSLDTTTQQKIGGTRMPTRSHRNPVSMETKSSCLPAQQVETEGVAPHKRKIT

SEQ ID NO: 3146 - protein, 168 aa, Homo sapiens
MSPTTGPQPNPRAWECHHTTGPQPNPRAWECHRMKGPQPNPRAWECHLRRVHNLTPEPGNVTIRGVHILTPEPGNVTIRGVHNLTPEPGNVTERGVHNLTPEPGNVTERGVHNLIPEPGNVTVKRGPQPNPRAWECHRTRGPQPNPRAWECHRTRGPQPNPRAWECHR

SEQ ID NO: 3147 - protein, 625 aa, Homo sapiens
MSGLVLGQRDEPAGHRLSQEEILGSTRLVSQGLEALRSEHQAVLQSLSQTIECLQTIECLQQGGHEEGLVHEKARQLRRSMENIELGLSEAQVMLALASHLSTVESEKQKLRAQVRRLCQENQWLRDELAGTQQRLQRSEQAVAQLEEEKKHLEFLGQLRQYDEDGHTSEEKEGDATKDSLDDLFPNEEEEDPSNGLSRGQGATAAQQGGYEIPARLRTLHNLVIQYAAQGRYEVAVPLCKQALEDLERTSGRGHPDVATMLNILALVYRDQNKYKEAAHLLNDALSIRESTLGPDHPAVAATLNNLAVLYGKRGKYKEAEPLCQRALEIREKVLGTNHPDVAKQLNNLALLCQNQGKYEAVERYYQRALAIYEGQLGPDNPNVARTKNNLASCYLKQGKYAEAETLYKEILTRAHVQEFGSVDDDHKPIWMHAEEREEMSKSRHHEGGTPYAEYGGWYKACKVSSPTVNTTLRNLGALYRRQGKLEAAETLEECALRSRRQGTDPISQTKVAELLGESDGRRTSQEGPGDSVKFEGGEDASVAVEWSGDGSGTLQRSGSLGKIRDVLRRSSELLVRKLQGTEPRPSSSNMKRAASLNYLNQPSAAPLQVSRGLSASTMDLSSSS

SEQ ID NO: 3148 - protein, 189 aa, Homo sapiens [sequence omitted]

SEQ ID NO: 3149 - protein, 267 aa, Homo sapiens [sequence omitted]

SEQ ID NO: 3150 - protein, 157 aa, Homo sapiens [sequence omitted]

SEQ ID NO: 3151 - protein, 270 aa, Homo sapiens [sequence omitted]

SEQ ID NO: 3152 - protein, 146 aa, Homo sapiens [sequence omitted]

SEQ ID NO: 3153 - protein, 640 aa, Homo sapiens
MENQLAKSTEERTFQYQDSLPSLPVPSLEESLKKYLESVTRTCYQIRGLDPDAKRGFLDLTREGIQVKPFANQEEYKKTEEIVQKFQSGIGEKLHQKLLERAKGKRNWLEEWWLNVAYLDVRIPSQLNVNFAGPAAHFEHYWPPKEGTQLERGSITLWHNLNYWQLLRKEKVPVHKVGNTPLDMNQFRMLFSTCKVPGITRDSIMNYFRTESEGRSPNHIVVLCRGRAFVFDVIHEGCLVTPPELLRQLTYIHKKCHSEPDGPGIAALTSEERTRWAKAREYLIGLDPENLALLEKIQSSLLVYSMEDSSPHVTPEDYSEIIAAILIGDPTVRWGDKSYNLISFSNGVFGCNCDHAPFDAMIMVNISYYVDEKIFQNEGRWKGSEKVRDIPLPEELIFIVDEKVLNDINQAKAQYLREASDLQIAAYAFTSFGKKLTKNKMLHPDTFIQLALQLAYYRLHGHPGCCYETAMTRHFYHGRTETMRSCTVEAVRWCQSMQDPSVNLRERQQKMLQAFAKHNKMMKDCSAGKGFDRHLLGLLLIAKEEGLPVPELFTDPLFSKSGGGGNFVLSTSLVGYLRVQGVVVPMVHNGYGFFYHIRDDRFVVACSAWKSCPETDAEKLVQLTFCAFHDMIQLMNSTHL

SEQ ID NO: 3154 - protein, 363 aa, Homo sapiens
MEPKPQKSPGKQFTFSYENEVCKQDYFIKSPPSQLFSSVTSWKKRFFILSKAGEKSFSLSYYKDHHHRGSIEIDQNSSVEVGISSQEKMQSVQKMFKCHPDEVMSIRTTNREYFLIGHDREKIKDWVSFMSSFRQDIKATQQNTEEELSLGNKRTLFYSSPLLGPSSTSEAVGSSSPRNGLQDKHLMEQSSPGFRQTHLQDLSEATQDVKEENHYLTPRSVLLELDNIIASSDSGESIETDGPDQVSGRIECHYEPMESYFFKETSHESVDSSKEEPQTLPETQDGDLHLQEQGSGIDWCLSPADVEAQTTNDQKGSASLTVVQLSILINNIPDESQVEKLNVFLSPPDVINYLALTEATGRI

SEQ ID NO: 3155 - protein, 184 aa, Homo sapiens
MWEGAAFARGNGGGLFCVVLGGAVAHLRETAGLGRAKAWKGGWNGFLVFSRVPSAGFFASAQVPQGPGALRRSRGGCVSGVESFVTQKIGEEWGRGGGGEGRQELAAARWALEIEVGRGGEVREPARPFLLLACPRLSLCGMLAGSPALFFWGGGVIAGCGSVFVLVTVIQESAIGKTPGLGGK

SEQ ID NO: 3156 - protein, 123 aa, Homo sapiens [sequence omitted]

SEQ ID NO: 3157 - protein, 222 aa, Homo sapiens
MFPIEAGAINPENRIIPHLPAPKWFDGQRAAENRQGTLTEYCSTLMSLPTKISRCPHLLDFFKVRPDDLKLPTDNQTKKPETYLMPKDGKSTATDITGPIILQTYRAIANYEKTSGSEMALSTGDVVEVVEKSESGQTSHLTGLLPLVLRNPQPQAPCQGSGSLAPGRTPALLGALNVLPTLWVAFCLSVHPVVAVGICAWQAGAGHVCVFCLDGYGTVCSL

SEQ ID NO: 3158 - protein, 149 aa, Homo sapiens [sequence omitted]

SEQ ID NO: 3159 - protein, 549 aa, Homo sapiens
MPVDLGQALGLLPSLAKAEDSQFSESDAALQEELSSPETARQLFRQFRYQVMSGPHETLKQLRKLCFQWLQPEVHTKEQILEILMLEQFLTILPGEIQMWVRKQCPGSGEEAVTLVESLKGDPQRLWQWISIQVLGQDILSEKMESPSCQVGEVEPHLEVVPQELGLENSSSGPGELLSHIVKEESDTEAELALAASQPARLEERLIRDQDLGASLLSAAPQEQWRQLDSTQKEQYWDLMLETYGKMVSGAGISHPKSDLTNSIEFGEELAGIYLHVNEKIPRPTCIGDRQENDKENLNLENHRDQELLHASCQASGEVPSQASLRGFFTEDEPGCFGEGENLPEALQNIQDEGTGEQLSPQERISEKQLGQHLPNPHSGEMSTMWLEEKRETSQKGQPRAPMAQKLPTCRECGKTFYRNSQLIFHQRTHTGETYFQCTICKKAFLRSSDFVKHQRTHTGEKPCKCDYCGKGFSDFSGLRHHEKIHTGEEPYKCPICEKSFIQRSNFNRHQRVHTGEKPYKCSHCGKSFSWSSSLDKHQRSHLGKKPFQ

SEQ ID NO: 3160 - protein, 135 aa, Homo sapiens
MTGSNSHITILTLNVNGLNAPIKRHRLADWIKSQDPSVCCIQETHLKCRDTHRLKIKGWRKIYQTNGKQKKAGITILVSDKTDFKPTKIKRDKEGHYIMVKGSIQQEELTILNIYAPNTGAPRFIKQVLRDQEET

SEQ ID NO: 3161 - protein, 197 aa, Homo sapiens; identical to SEQ ID NO: 2310

SEQ ID NO: 3162 - protein, 124 aa, Homo sapiens
MPMIHHSTCFPGCNPLQFPNKLLLWRSCLSLSLFRLTPFMSCIAVDDTHICTSCLNVPSPNSKIPLSVYPVPLFEPLRGISDLKCPKLSPCDAPRAAPPHHLLLSNGSLILLWALFSPPTLELS

SEQ ID NO: 3163 - protein, 187 aa, Homo sapiens
MQTPSQPLPTYDEVLLCTPATTFEEVALLLRRCLTLGSLGHKVYSLLFADQLSYEVARQAEELFHNLCTQQHREDYQLVMVCDGDWEHCYLPSAFSQHKVFVTPQAPLEAIQAYLAGHYRVPKQTLSAAAVFNDRLCVGIVASERAGVGKESGRVGRPRLPGTARGPSPLQQMKPVCRWRNRGSGRV

SEQ ID NO: 3164 - protein, 127 aa, Homo sapiens [sequence omitted]

SEQ ID NO: 3165 - protein, 135 aa, Homo sapiens [sequence omitted]

SEQ ID NO: 3166 - protein, 113 aa, Homo sapiens
MWLQCFSLHPVPPRALTGFRCGCIRGTCSWDSSCLWEQDQGSWESPWTWCYPLVLGSRECFPAQGSRGAGMRLRQPDRGKLQGEECLFTKISNTVCPFPFRTPYLMPSASKYP

SEQ ID NO: 3167 - protein, 229 aa, Homo sapiens
MGCLALSWGHEAWFAKWEPRDMCSKRHIQGLQSISKGPFLLSAMLLRKAMNHVPQESWENPRAWELVTDPHSERSLHSYTATPPPPAHQDGSAAAKGECLVPKAGPSSMVLLASLSSVSLRDPVATAPSVLPRVAVPTSGCEEPAWHSCVSAGRPCLKQTAIQRGIPGFHGNCSCPVFRPQLGLGSSCCVMGDPLVYRQPQGPGHGASFPCLGPEIWEAHRGRCFPQPH

SEQ ID NO: 3168 - protein, 500 aa, Homo sapiens [sequence omitted]

SEQ ID NO: 3169 - protein, 117 aa, Homo sapiens
MDSLAAGELNASHQPWVPEFVAYWRKTHQDHLCSLHSRAFGLLDARVTWALRRAPEPVPGKDRLLLAAFPAEASPVDTASVSVYGRAPRYMHKGVKKCVCTPVSKNSTAWLLLGGIS

SEQ ID NO: 3170 - protein, 488 aa, Homo sapiens [sequence omitted]

SEQ ID NO: 3171 - protein, 110 aa, Homo sapiens [sequence omitted]

SEQ ID NO: 3172 - protein, 194 aa, Homo sapiens [sequence omitted]

SEQ ID NO: 3173 - protein, 468 aa, Homo sapiens [sequence omitted]

SEQ ID NO: 3174 - protein, 252 aa, Homo sapiens
MAPQRPLVQAGRAAQGGYHACCPLTGLPSGHPELPEDTPAGRLQPDQHRPGPHGTLSPPSLPLPTSCPSACPAPDSDGRVTRDRISGLEPHWLPTSGSCSGVTGPASYSWAAPLHCRVLMLPGEGRPHPGAVGQPRVSPSQVSALLFSSFLWFAIRCGCSLDRKGKYTLTPRACGRQPQEPSLLRCSQGGPTHCLHSEAVAIGPRGCSGSLRWLQESDAAPLPLSCHLAAHRALQGRSRGGLSGCPERGLSD

SEQ ID NO: 3175 - protein, 326 aa, Homo sapiens [sequence omitted]

SEQ ID NO: 3176 - protein, 103 aa, Homo sapiens
MLHSTTEYRTLHLTTEDRTLHPTEYTTIPPATEYRTRHPTREYRTRHPTREYRTHYPTTEYRTLHQQQNIQHATQRQNIQHATQQQNIQHATQQQQNTPPNRR

SEQ ID NO: 3177 - protein, 186 aa, Homo sapiens
MAFYSTPEYDIQLARGLLSGMFLFATRRSEPAGRPHSWHTTKSGEKQPDASMMQISQGMIGPPWHQSYHSSSSTSDLSNYDHAYLRRSPDQCSSQGSMESLEPSGAYPPCHLSPAKSTGSIDQLSHFHNKRDSAYSSFSTSSSILEYPHPGKRVKTRDLPGSQSPGRAISRKTTMPTSGGGWREKA

SEQ ID NO: 3178 - protein, 101 aa, Homo sapiens [sequence omitted]

SEQ ID NO: 3179 - protein, 321 aa, Homo sapiens [sequence omitted]

SEQ ID NO: 3180 - protein, 100 aa, Homo sapiens [sequence omitted]

SEQ ID NO: 3181 - protein, 154 aa, Homo sapiens [sequence omitted]

SEQ ID NO: 3182 - protein, 183 aa, Homo sapiens
MGRADITRDFGALTGASNLGCMDTSCWLESPRYECVWVCAPFMCCHRAHECAEREGHGQGAMVDRRPSWGFGGVLDPTLTEHCPKALPFQAPFPEPPTPGPPTCWVLPPAGPAMRGHHASLTMQGHHTSLTMQGHHASLTMQGHHAGSPCRVTMWGHHAGLTMWGFRSLLSTLPTHGHSPWGL

SEQ ID NO: 3183 - protein, 136 aa, Homo sapiens [sequence omitted]

SEQ ID NO: 3184 - protein, 134 aa, Homo sapiens [sequence omitted]

SEQ ID NO: 3185 - protein, 515 aa, Homo sapiens
MAKSNGENGPRAPAAGESLSGTRESLAQGPDAATTDELSSLGSDSEANGFAERRIDKFGFIVGSQGAEGAPCPLLHRLEEVPLEVLRQRESKWLDMLNNWDKWMAKKHKKIRLRCQKGIPPSLRGRAWQYLSGGKVKLQQNPGKFDELDMSPGDPKWLDVIERDLHRQFPFHEMFVSRGGHGQQDLFRVLKAYTLYRPEEGYCQAQAPIAAVLLMHMPAEQAFWCLVQICEKYLPGYYSEKLEAIQLDGEILFSLLQKVSPVAHKHLSRQKIDPLLYMTEWFMCAFSRTLPWSSVLRVWDMFFCEGVKIIFRVGLVLLKHALGSPEKVKACQGQYETIERLRSLSPKIMQEAFLVQEVVELPVTERQIEREHLIQLRRWQETRGELQCRSPPRLHGAKAILDAEPGPRPALQPSPSIRLPLDAPLPGSKAKPKPPKQAQKEQRKQMKGRGQLEKPPAPNQAMVVAAAGDACPPQHVPPKDSAPKDSAPQDLAPQVSAHHRSQESLTSQESEDTYL

SEQ ID NO: 3186 - protein, 402 aa, Homo sapiens
MRSGGVRSFALELARGPGGAYRGGERLCGRVLLEAAAPLRVRALEVKARGGAATHWLEGRSVGVNAVSSDYAAAETYLRRRQLLLRDTGETTTLPPGRHEFLFSFQLPPTLVTSFEGKHGSVRYCIKATLHRPWVPARRARKVFTVIEPVDINTPALLAPQAGAREKVARSWYCNRGLVSLSAKIDRKGYTPGEVIPVFAEIDNGSTRPVLPRAAVVQTQTFMARGARKQKRAVVASLAGEPVGPGQRALWQGRALRIPPVGPSILHCRVLHVDYALKVCVDIPGTSKLLLELPLVIGTIPLHPFGSRSSSVGSHASFLLDWRLGALPERPEAPPEYSEVVADTEEAALGQSPFPLPQDPDMSLEGPFFAYIQEFRYRPPPLYSEEDPNPLLGDMRPRCMTC

SEQ ID NO: 3187 - protein, 517 aa, Homo sapiens
MGDIQVLTLLPLPPARPESTMPDPFPLLRSMGSAFERVVRRVVQELDHGGEFIPVTSLQSSTGFQPYCLVVRKPSSSWFWKPRYKCVNLSIKDILEPDAAEPDVQRGRSFHFYDAMDGQIQGSVELAAPGQAKIAGGAAVSDSSSTSMNVYSLSVDPNTWQTLLHERWARRGQGRAGPHPPQATLLLFIYLFKLFFEVRFCYLGQGGLELLASSSPPASASQSAGITGVSHCARSQPCSWEGHNLGASGKSQRQKSAVAGTSLQEGSCRGHLGPPLPGLDPKDRTEPQAAVRTRGGVNTGAQVRGPHLESGLGVPESTFPHGVPSPWGAHGEAAGAPAPTDLWRAPLHHLPRWRGAVRGGKTPSGAAAQRALLLLGHRHLRQPEHKVLQQLRSRGDNVYVVTEVLQTQKEVEVTRTHKREGSGRFSLPGATCLQVCSQPRATPGPPRGHAAAGDGGGGLGSAKAPRSSSQPCAWLRSRSHLAAGLPPAPGPHPHPTARCQGPAPSPSPCLRVRARAI

SEQ ID NO: 3188 - protein, 669 aa, Homo sapiens
MAEQESLEFGKAGFVLMDTVSMPEFMANLRLRFEKGRIYTFIGEVVVSVNPYKLLNIYGRDTIEQYKGRELYERPPHLFAIADAAYKAMKRRSKDTCIVISGESGAGKTEASKYIMQYIAAITNPSQRAEVERVKNMLLKSNCVLEAFGNAKTNRNDNSSRFGKYMDINFDFKGDPIGGHINNYLLEKSRVIVQQPGERSFHSFYQLLQGGSEQMLRSLHLQKSLSSYNYIHVGAQLKSSINDAAEFRVVADAMKVIGFKPEEIQTVYKILAAILHLGNLKFVVDGDTPLIENGKVVSIIAELLSTKTDMVEKALLYRTVATGRDIIDKQHTEQEASYGRDAFAKAIYERLFCWIVTRINDIIEVKNYDTTIHGKNTVIGVLDIYGFEIFDNNSFEQFCINYCNEKLQQLFIQLVLKQEQEEYQREGIPWKHIDYFNNQIIVDLVEQQHKGIIAILDDACMNVGKVTDEMFLEALNSKLGKHAHFSSRKLCASDKILEFDRDFRIRHYAGDVVYSVIGFIDKNKDTLFQDFKRLMYNSSNPVLKNMWPEGKLSITEVTKRPLTAATLFKNSMIALVDNLASKEPYYVRCIKPNDKKSPQIFDDERCRHQVEYLGLLENVRVRRAGFAFRQTYEKFLHRYKMISEFTWPNHDLPSDKEAVKKLIERWFSG

SEQ ID NO: 3189 - protein, 703 aa, Homo sapiens [sequence omitted]

SEQ ID NO: 3190 - protein, 473 aa, Homo sapiens
MRAGPGPTVTLALVLAVAWAMELKPTAPPIFTGRPFVVAWDVPTQDCGPRLKVPLDLNAFDVQASPNEGFVNQNITIFYRDRLGLYPRFDSAGRSVHGGVPQNVSLWAHRKMLQKRVEHYIRTQESAGLAVIDWEDWRPVWVRNWQDKDVYRRLSRQLVASRHPDWPPDRIVKQAQYEFEFAAQQFMLETLRYVKAVRPRHLWGFYLFPDCYNHDYVQNWESYTGRCPDVEVARNDQLAWLWAESTALFPSVYLDETLASSRHGRNFVSFRVQEALRVARTHHANHALPVYVFTRPTYSRRLTGLSEMDLISTIGESAALGAAGVILWGDAGYTTSTETCQYLKDYLTRLLVPYVVNVSWATQYCSRAQCHGHGRCVRRNPSASTFLHLSTNSFRLVPGHAPGEPQLRPVGELSWADIDHLQTHFRCQCYLGWSGEQCQWDHRQAAGGASEAWAGSHLTSLLALAALAFTWTL

SEQ ID NO: 3191 - protein, 714 aa, Homo sapiens [sequence omitted]

SEQ ID NO: 3192 - protein, 454 aa, Homo sapiens
MATNIEQIFRSFVVSKFREIQQELSSGRNEGQLNGETNTPIEGNQAGDAAASARSLPNEEIVQKIEEVLSGVLDTELRYKPDKAQLLEIAKANAAAMCAKAGVPLPPNLKPAPPPTIEEKVAKKSGGATIEELTEKCKQIAQSKEDDDVIVNKPHVSDEEEEEPPFYHHPFKLSEPKPIFFNLNIAAAKPTPPKSQVTLTKEFPVSSGSQHRKKEADSVYGEWVPVEKNGEENKDDDNVFSSNLPSEPVDISTAMSERALAQKRLSENAFDLEAMSMLNRAQERIDAWAQLNSIPGQFTGSTGVQVLTQEQLANTGAQAWIKKDQFLRAAPVTGGMGAVLMRKMGWREGEGLGKNKEGNKEPILVDFKTDRKGLVAVGERAQKRSGNFSAAMKDLSGKHPVSALMEICNKRRWQPPEFLLVHDSGPDHRKHFLFRVLRNGSPYQPNCMFFLNRY

SEQ ID NO: 3193 - protein, 664 aa, Homo sapiens
MLMDAGQDYMVFEDVAIHFSQEEWGILNDVQRHLHSDVMLENFALLSSVGCWHGAKDEEAPSKQCVSVGVSQVTTLKPALSTQKAQPCETCSSLLKDILHLAEHDGTHPKRTAKLYLHQKEHLREKLTRSDEGRPSFVNDSVHLAKRNLTCMQGGKDFTGDSDLQQQALHSGWKPHRDTHGVEAFQSGQNNYSCTQCGKDFCHQHTLFEHQKIHTEERPYECSECGKLFRYNSDLIKHQRNHTGERPYKCSECGKAFSLKYNVVQHQKIHTGERPYECSECGKAFLRKSHLLQHQRIHTRPRPYVCSECGKAFLTQAHLVGHQKIHTGERPYGCNECGKYFMYSSALIRHQKVHTGERPFYCCECGKFFMDSCTLIIHQRVHTGEKPYECNECGKSFRYRSTLIRHQKVHTGEKPYECSECGKFFMDTSTLIIHQRVHTGEKPYECNKCGKFFRYCFTLNRHQRVHSGERPYECSECGKFFVDSCTLKSHQRVHTGERPFECSICGKSFRCRSTLDTHQRIHTGERPYECSECGKFFRHNSNHIRHRRNHFGERSFECTECGRVFSQNSHLIRHQKVHTRERTYKCSKCGKFFMDSSTLISHERVHTGEKPYECSECGKVFRYNSSLIKHRRIHTGERPYQCSECGRVFNQNSHLIQHQKVHTR

SEQ ID NO: 3194 - protein, 714 aa, Homo sapiens [sequence omitted]

SEQ ID NO: 3195 - protein, 821 aa, Homo sapiens
MAKFALNQNLPDLGGPRLCPVPAAGGARSPSSPYSVETPYGFHLDLDFLKYIEELERGPAARRAPGPPTSRRPRAPRPGLAGARSPGAWTSSESLASDDGGAPGILSQGAPSGLLMQPLSPRAPVRNPRVEHTLRETSRRLELAQTHERAPSPGRGVPRSPRGSGRSSPAPNLAPASPGPAQLQLVREQMAAALRRLRELEDQARTLPELQEQVRALRAEKARLLAGRAQPEPDGEAETRPDKLAQLRRLTERLATSERGGRARASPRADSPDGLAAGRSEGALQVLYGEVGSLDGTPQTREVAAEAVPETREAGAQAVPETREAGVEAAPETVEADAWVTEALLGLPAAAERELELLRASLEHQRGVSELLRGRLRELEEAREAAEEAAAGARAQLREATTQTPWSCAEKAAQTESPAEAPSLTQESSPGSMDGDRAVAPAGILKSIMKKRDGTPGAQPSSGPKSLQFVGVLNGEYESSSSEDTSDSDGDSENGGAEPPGSSSGSGDDSGGGSDSGTPGPPSGGDIRDPEPEAEAEPQQVAQGRCELSPRLREACVALQRQLSRPRGVASDGGAVRLVAQEWFRVSSQRRSQAEPVARMLEGVRRLGPELLAHVVNLADGNGNTALHYSVSHGNLAIASLLLDTGACEVNRQNRAGYSALMLAALTSVRQEEEDMAVVQRLFCMGDVNAKASQTGQTALMLAISHGRQDMVATLLACGADVNAQDADGATALMCASEYGRLDTVRLLLTQPGCDPAILDNEGTSALAIALEAEQDEVAALLHAHLSSGQPDTQSESPPGSQTATPGEGECGDNGENPQVQ

SEQ ID NO: 3196 - protein, 121 aa, Homo sapiens
MGGLSSPAHSSIPSWYNLGSPPMFVCEGCCDKLHACRLQTRERFSFTVVESDARTQGVGRASFPPEARENLSSLFQLLWLLAIPGISCLVAASLQSLPLPSRPLLLGDFSSVSYNDTYHWT

SEQ ID NO: 3197 - protein, 515 aa, Homo sapiens
MATSTGRWLLLRLALFGFLWEASGGLDSGASRDDDLLLPYPRARARLPRDCTRVRAGNREHESWPPPPATPGAGGLAVRTFVSHFRDRAVAGHLTRAVEPLRTFSVLEPGGPGGCAARRRATVEETARAADCRVAQNGGFFRMNSGECLGNVVSDERRVSSSGGLQNAQFGIRRDGTLVTGYLSEEEVLDTENPFVQLLSGVVWLIRNGSIYINESQATECDETQETGSFSKFVNVISARTAIGHDRKGQLVLFHADGQTEQRGINLWEMAEFLLKQDVVNAINLDGGGSATFVLNGTLASYPSDHCQDNMWRCPRQVSTVVCVHEPRCQPPDCHGHGTCVDGHCQCTGHFWRGPGCDELDCGPSNCSQHGLCTETGCRCDAGWTGSNCSEECPLGWHGPGCQRPCKCEHHCPCDPKTGNCSVSRVKQCLQPPEATLRAGELSFFTRTAWLALTLALAFLLLISTAANLSLLLSRAERNRRLHGDYAYHPLQEMNGEPLAAEKEQPGGAHNPFKD

SEQ ID NO: 3198 - protein, 114 aa, Homo sapiens
MLLHYSLGNRVRLHLKKKKGPPGAPGFITNGLTMATRVLFQALVSLSPMLTSSGHKAASSITGSSSPPRSCSRHLDCLPSTFLPPPSAQPKGHFLTEAVPEPQSKLHPHKDTKM

SEQ ID NO: 3199 - protein, 148 aa, Homo sapiens [sequence omitted]

SEQ ID NO: 3200 - protein, 116 aa, Homo sapiens
MQPLENFTVPSCQNENKKMRKLKQKEAKQLNDTLQGVCPHCWFSRPLPAYSSSLFSSHAILQKDGHVPDSSVCRPTAVLYRICLCMQVGLFIRKNPISHAIEYEKATFRGCWKTYF

SEQ ID NO: 3201 - protein, 143 aa, Homo sapiens [sequence omitted]

SEQ ID NO: 3202 - protein, 163 aa, Homo sapiens
MQSVDSMLGTVGGCGGGEAASTFSKDPSGCCVGNDCRDGGRGLERRHGRWSRGEGGESGLCSGGQMASEIEYWDGLAISVMEVEKAFGSTNVLWKTEPFSLWACTAACPPSLSPTLLALGLPRDGKELAEQGSLWTVLEPGGDWSHSQSQLGTPGRGKGALGF

SEQ ID NO: 3203 - protein, 113 aa, Homo sapiens
MAPCDLVPATSSISWPFTVVFLLFVNMPALFWSLSLHWLFCQTQALPMAPCHSSVSPVFAEEPSLTILFKIAPIPHLSHYLLHFVLFMTHLTNLICMSLPGIHLRLTPHLHRH

SEQ ID NO: 3204 - protein, 886 aa, Homo sapiens
MDAYALAPYAGAGPLVGVPGVGAPTPFSFPKRAHLLFPPPREEGLGFPSFLDPDRHFLSAFRREEPPRMPGGALEPHAGLRPLSRRLEAEAGPAGELAGARGFFQARHLEMDAFKRHSFATEGAGAVENFAAARQVSRQTFLSHGDDFRFQTSHFHRDQLYQQQYQWDPQLTPARPQGLFEKLRGGRAGFADPDDFTLGAGPRFPELGPDGHQRLDYVPSSASREVRHGSDPAFAPGPRGLEPSGAPRPNLTQRFPCQAAARPGPDPAPEAEPERRGGPEGRAGLRRWRLASYLSGCHGEDGGDDGLPAPMVAEAYEDDVLAPGGRAPAGDLLPSAFRVPAAFPTKVPVPGPGSGGNGPEREGPEEPGLAKQDSFRSRLNPLVQRSSRLRSSLIFSTSQAEGAAGAAAATEKVQLLHKEQTVSETLGPGGEAVRSAASTKVAELLEKYKGPARDPGGGAGAITVASHSKAVVSQAWREEVAAPGAVGGERRSLESCLLDLRDSFAQQLHQEAERQPGAASLTAAQLLDTLGRSGSDRLPSRFLSAQSHSTSPQGLDSPLPLEGSGAHQVLHNESKGSPTSAYPERKGSPTPGFSTRRGSPTTGFIEQKGSPTSAYPERRGSPVPPVPERRSSPVPPVPERRGSLTLTISGESPKAGPAEEGPSGPMEVLRKGSLRLRQLLSPKGERRMEDEGGFPVPQENGQPESPRRLSLGQGDSTEAATEERGPRARLSSATANALYSSNLRDDTKAILEQISAHGQKHRAVPAPSPGPTHNSPELGRPPAAGVLAPDMSDKDKCSAIFRSDSLGTQGRLSRTLPASAEERDRLLRRMESMRKEKRVYSRFEVFCKKEEASSPGAGEGPAEEGTRDSKVGKFVPKILGTFKSKK

SEQ ID NO: 3205 - protein, 243 aa, Homo sapiens
MSWTVSVVQASRRVSSAGANFLSLCPSQAARMPLKGAWLFTPVKSELVERFTSEEPAHHSKVSIIGTGSVGMACATSILLKGLSDELALVDLDEGKLKGETMDLQHGSPFMKTPNIVCSKDYLVTANSSLVIITEGARQEKGETRLNLVQRNVAIFKLMISGIVQYSPLCKLIIVSNPVDNLTYVAWKLSAFSKNRVIGSGCNLDTARFCFLFGQKLGIHSENCHGWILGEHGDSSVPVWSME

SEQ ID NO: 3206 - protein, 413 aa, Homo sapiens [sequence omitted]

SEQ ID NO: 3207 - protein, 103 aa, Homo sapiens
MTNGGSINSSTHLLDLLDEPIPGVGTYDDFHTIDWVQEKCKDRERHRWMESRCLQAGVQRRNLGSLQPLPPGFKGFSCFSLPSSWDYRKLLTCGELKQKKTTM

SEQ ID NO: 3208 - protein, 172 aa, Homo sapiens [sequence omitted]

SEQ ID NO: 3209 - protein, 459 aa, Homo sapiens [sequence omitted]

SEQ ID NO: 3210 - protein, 180 aa, Homo sapiens
MGVPTARGGREDSSQSPPSRGCLPLLRWGSSEPGGEEGLPLSPCLAGGASAPSDGDPKSKGGKRGSLSVPASRGVPPPLRWGCKEPGEERGRFAVPASRGLPPPLRWWSQEPGGEEGLALSPRLVGGASPTLRWESQEPGGKRGWISAITKWGAFMFRFCPRISLFASCTSRAVAAKALK

SEQ ID NO: 3211 - protein, 243 aa, Homo sapiens
MFAGHVGVGRLVSKKLQIPPSQAWTFLSALNQVTPAEVSCSLSSSLFPLPSLSCVQVSCFNELEVCIHPDGVIPVLTFLRDHTNAQFKSLVDLTAVDVPTRQNRFEIVYNLLSLRFNSRIRVKTYTDELTPIESAVSVFKAANWYEREIWDMFGVFFANHPDLRRILTDYGFEGHPFRKDFPLSGYVELRYDDEVKRVVAEPVELAQEFRKFDLNSPWEAFPVYRQPPESLKLEAGDKKPDAK

SEQ ID NO: 3212 - protein, 320 aa, Homo sapiens
MPEARSSGPDLTRWRKQQQPVRRTVSQVCPPPRRPLTVADIRSGMENERLGVVRDSMFQNPLIVKAAGPASVGTSYSVYDSSAVQKVIPSLAGHHIKGGPQAELGKPRERSYSLPGINFNYGLYIRGLDGGVPEAIGRWNVFKQQPTCPHELTRNYIAMNRGAVKAGLVTARENLLYRQLNDIRISDQDDRRMKKEPPPLPPNMTFGIRARPSTPFFDLLQHRYLQLWVQEQKATQKAIKLEKKQKVVLGKLYETRSSQLRKYKPPVKLDTLWHMPHFQKVGRHLDTFPTEADRQRALKAHREECAVRQGTLRMGNYTHP

SEQ ID NO: 3213 - protein, 572 aa, Homo sapiens [sequence omitted]

SEQ ID NO: 3214 - protein, 134 aa, Homo sapiens
MGVPRFGGEEGLAVSTRLAGGAFPPCDGGPKCQGGNTGWLSILGSRGLPPPTAMGVLRARGEEGLVLSPCLMGGASRSAMGVLRASGGRGAGSQFLPGGGCLPPSAVGVLRARGGRGAGCQSPPRGVCLPPLRW

SEQ ID NO: 3215 - protein, 541 aa, Homo sapiens
MKSYTPYFILLWSAVGIAKAAKIIIVPPIMFESHMYIFKTLASALHERGHHTVFLLSEGRDIAPSNHYSLQRYPGIFNSTTSDAFLQSKMRNIFSGRLTAIELFDILDHYTKNCDLMVGNHALIQGLKKEKFDLLLVDPNDMCGFVIAHLLGVKYAVFSTGLWYPAEVGAPAPLAYVPEFNSLLTDRMNLLQRMKNTGVYLISRLGVSFLVLPKYERIMQKYNLLPEKSMYDLVHGSSLWMLCTDVALEFPRPTLPNVVYVGGILTKPASPLPEDLQRWVNGANEHGFVLVSFGAGVKYLSEDIANKLAGALGRLPQKVIWRFSGPKPKNLGNNTKLIEWLPQNDLLGHSKIKAFLSHGGLNSIFETMYHGVPVVGIPLFGDHYDTMTRVQAKGMGILLEWKTVTEKELYEALVKVINNPSYRQRAQKLSEIHKDQPGHPVNRTIYWIDYIIRHNGAHHLRAAVHQISFCQYFLLDIAFVLLLGAALLYFLLSWVTKFIYRKIKSLWSRNKHSTVNGHYHNGILNGKYKRNGHIKHEKKVK

SEQ ID NO: 3216 - protein, 160 aa, Homo sapiens
MCCPGGHYTLILRRGNRFRREKRPAKVTGAQTEVQLAPPLPRGRARRSPWSVPISLSIDRLEFDLLYPAIKGDTIQLYLGAKLLDSQGKVTKWFNNSAASLTMPTLDNIPFSLIVSQDVVKAAVAAVLSPEEFMVLLDSVLPESAHRLKSSIGLINEKLQ

SEQ ID NO: 3217 - protein, 628 aa, Homo sapiens [sequence omitted]

SEQ ID NO: 3218 - protein, 566 aa, Homo sapiens
MGTSPCEAELQELMEQIDIMVSNKKMDWERKMRALETRLDLRDQELANAQTCLDQKGQEVGLLRQKLDSLEKCNLAMTQNYEGQLQSLKAQFSKLTNNFEKLRLHQMKQNKVPRKELPHLKEEIPFELSNLNQKLEEFRAKSREWDKQEILYQTHLISLDAQQKLLSEKCNQFQKQAQSYQTQLNGKKQCLEDSSSEIPRLICDPDPNCEINERNEFIIEKLKSAVNEIALSRNKLQDENQKLLQELKMYQRQCQAMEAGLSEVKSELQSRDDLLRIIEMERLQLHRELLKIGECQNAQGNKTRLESSYLPSIKEPERKIKELFSVMQDQPNHEKELNKIRSQLQQVEEYHNSEQERMRNEISDLTEELHQKEITIATVTKKAALLEKQLKMELEIKEKMLAKQKVSDMKYKAVRTENTHLKGMMGDLDPGRYMSMDFTNREQSRHTSINKLQYENERLRNDLAKLHVNGKSTWTNQNTYEETGRYAYQSQIKVEKNEERLSHDCEPNRSTMPPLPPSTFQAKEMTSPLVSDDDVFPLVSCWLWAFFFFNGLLLYSYTDVNKLTYI

SEQ ID NO: 3219 - protein, 148 aa, Homo sapiens
MRCVTRTRNWWRRAARMPRAGSSAWWVAVCKQVCTRVGTYAVCWCSWNTGRFTGCPSWKDFWKPVGPALHVFDVKCEAQRGLKLTQPFTVACKIDPVLCKSGLGFPPQLFTGCVYLSTYTYPWQAQAECVRCPRDSNRCKRITPSACL

SEQ ID NO: 3220 - protein, 100 aa, Homo sapiens [sequence omitted]

SEQ ID NO: 3221 - protein, 470 aa, Homo sapiens
MSLLGRDYNSELNSLDNGPQSPSESSSSITSENVHPAGEAGLSMMQTLIHLLKCNIGTGLLGLPLAIKNAGLLVGPVSLLAIGVLTVHCMVILLNCAQHLSQRLQKTFVNYGEATMYGLETCPNTWLRAHAVWGRYTVSFLLVITQLGFCSVYFMFMADNLQQMVEEAHVTSNICQPREILTLTPILDIRFYMLIILPFLILLVFIQNLKVLSVFSTLANITTLGSMALIFEYIMEGIPYPSNLPLMANWKTFLLFFGTAIFTFEGVGMVLPLKNQMKHPQQFSFVLYLGMSIVIILYILLGTLGYMKFGSDTQASITLNLPNCWLYQSVKLMYSIGIFFTYALQFHVPAEIIIPFAISQVSESWALFVDLSVRSALVCLTCVSAILIPRLDLVISLVGSVSSSALALIIPALLEIVIFYSEDMSCVTIAKDIMISIVGLLGCIFGTYQALYELPQPISHSMANSTGVHA

SEQ ID NO: 3222 - protein, 567 aa, Homo sapiens
MDSGGSTLSSAASGLAPYPPAACLSTPYSSIPRGREKAGPMGSHQGPGPPPCQKAPSGPVTSCKAPFLVDQSQKLPAVPASSWKPPPGLAPPQKAPAASAPPRKAPAVPAPSQKAPAVPAPSQKAPAIPAPSRKASAASASPRKASAVPAPPQKTPPPSQKAPSVPTIPQKAVSPTAPKKKSLLLPAPSQKALPTSPTQYQMALSPPASRGKLPGDFDVLPTGIPGRAVLERSQSGGKPEPVVTVRTQETDVVEMTTQAKSPESPFTVTKKESKDILISQTEEVTLEAFRGQGKLEDWAHWAKLEERSPDLPGVRSKELEQRKRWVKAKELAVEGPSQEHSRPFSVEALTLTKLMITANSKEQRSKSALVSLPSWLLATPQASATSMMASVPSRPGQLSLLEGKPVVVREQPESHTWVKEGKRPWGEMKEPPWDPKGPPKVPFRSKPTSASLKREGISQAPIPLTASPWEDLRPSPLSETLISKMEATARASQQPKRVSQEPMRMPAQHPLATVGSSSEILLPMLLGLETVRNTATKAEEIQEESGVLNLLPSLQHSQHSEWPDAGA

SEQ ID NO: 3223 - protein, 900 aa, Homo sapiens [sequence omitted]

SEQ ID NO: 3224 - protein, 140 aa, Homo sapiens
MVQSSRSSATEKRVTPIHHGQSTQSGSALDPARQMQPLNRVCASKLDDDRRNPVASEKTPNPRMKASGSIPRNSCRGCCGIFFKRTKQGKTKFNRVEQPGVVGHACNLSNLGGQGRISAIWEAKAGRSLEPRSSRPAWAT

SEQ ID NO: 3225 - protein, 303 aa, Homo sapiens
MAFARRLLRGPLSGPLLGRRGVCAGAMAPPRRFVLELPDCTLAHFALGADAPGDADAPDPRLAALLGPPERSYSLCVPVTPDAGCGARVRAARLHQRLLHQLRRGPFQRCQLLRLLCYCPGGQAGGAQQGFLLRDPLDDPDTRQALLELLGACQEAPRPHLGEFEADPRGQLWQRLWEVQDGRRLQVGCAQVVPVPEPPLHPVVPDLPSSVVFPDREAARAVLEECTSFIPEARAVLDLVDQCPKQIQKGKFQVVAIEGLDATGKTTVTQSVADSLKAVPQPITLCTSGQRTCSNLTLSCCSL

SEQ ID NO: 3226 - protein, 316 aa, Homo sapiens
MVNQSSPMGFLLLGFSEHPALERTLFVVVFTSYLLTLVGNTLIILLSVLYPRLHSPMYFFLSDLSFLDLCFTTSCVPQMLVNLWGPKKTISFLGCSVQLFIFLSLGTTECILLTVMAFDRYVAVCQPLHYATIIHPRLCWQLASVAWVMSLVQSIVQTPSTLHLPFCPHQQIDDFLCEVPSLIRLSCGDTSYNEIQLAVSSVIFVVVPLSLILASYGATAQAVLRINSATAWRKAFGTCSSHLTVVTLFYSSVIAVYLQPKNPYAQGRGKFFGLFYAVGTPSLNPLVYTLRNKEIKRALRRLLGKERDSRESWRAA

SEQ ID NO: 3227 - protein, 104 aa, Homo sapiens
MLCPPRHSQILEGAVYTYSFIVPSTYSMTFKLVTMNHDESFSSTSCPITGGTTDFGHIAPTTSTPVPTSLEPVIPSSRKPSLDNLIKSLLMYYPEIHLHYTSHD

SEQ ID NO: 3228 - protein, 630 aa, Homo sapiens
MATNYSANQYEKAFSSKYLQNWSPTKPTKESISSHEGYTQIIANDRGHLLPSVPRSKANPWGSFMGTWQMPLKIPPARVTLTSRTTAGAASLTKWIQKNPDLLKASNGLCPEILGKPHDPDSQKKLRKKSITKTVQQARSPTIIPSSPSAHPLKPMWHAISRTSRMSQSGCPSGLLADKNISSSATRVIVKTAGNQKDFMVADDISVRQFKEMLLAHFQCQMDQLVLVFMGCLLKDHDTLSQRGIMDGHTIYLVIKSKQGSRSLAHSFRDLPTNDPCHRDRNTKGNSSRVHQPTGMNQAPVELAHFVGSDAPKVHTQNLEVSHPECKAQMLENPSIQRLLSNMEFMWQFISEHLDTQQLMQQNPEVSRLLLDNSEILLQTLELARNLAMIQEIMQIQQPSQNLEYPLNPQPYLGLETMPGGNNALGQNYVDINDQMLNSMQDPFGGNPFTALLAGQVLEQVQSSPPPPPPSQEQQDQLTQHPATRVIYNSSGGFSSNTSANDTLNKVNHTSKANTAMISTKGQSHICATRQPAGIPALPSIELTQQLQEEYKDATVSLSSSRQTLKGDLQLSDEQSSSQITGGMMQLLMNNPYLAAQIMLFTSMPQLSEQWRQQLPTFLQQTQISDLLSA

SEQ ID NO: 3229 - protein, 498 aa, Homo sapiens
MAICILTWRIRPFCIEPTNIVNVNHVIQRVSDHASAMNKRIHYYSRLTTPADKALIAPDHVVPAPEECYVYSPLGSAYKLQSYTEGYGKNTSLVTIFMIWNTMMGTSILSIPWGIKQAGFTTGMCVIILMGLLTLYCCYRVVKSRTMMFSLDTTSWEYPDVCRHYFGSFGQWSSLLFSLVSLIGAMIVYWVLMSNFLFNTGKFIFNFIHHINDTDTILSTNNSNPVICPSAGSGGHPDNSSMIFYANDTGAQQFEKWWDKSRTVPFYLVGLLLPLLNFKSPSFFSKFNILEIRFQFPQLTGVLTLAFFIHNCIITLLKNNKKQENNVRDLCIAYMLVTLTYLYIGVLVFASFPSPPLSKDCIEQNFLDNFPSSDTLSFIARIFLLFQMMTVYPLLGYLARVQLLGHIFGDIYPSIFHVLILNLIIVGAGVIMACFYPNIGGIIRYSGAACGLAFVFIYPSLIYIISLHQEERLTWPKLIFHVFIIILGVANLIVQFFM

SEQ ID NO: 3230 - protein, 267 aa, Homo sapiens [sequence omitted]

SEQ ID NO: 3231 - protein, 151 aa, Homo sapiens
MATVKCGVGSMRSKPFARAVPACPPTCSPALAGPPPPRFPERAASSEGSPTHSPPHPPQRLQPPVRVVPKPTRALSTLRQLHVQPPTRSQPHWRRTHHRSPFTRFTGSAAPTPSAQLHAASPHSPQRLQHPQCAQLCQSLPRVPPLHHFGP

SEQ ID NO: 3232 - protein, 143 aa, Homo sapiens
MLGIIPSLLRRALLQVHGSLCSIGRRPGDTGEARERGQVAPPDSLACCEEGRNGSLVPKVRPDRCVGEHGQHPGGAGRALEQASQFRPWPSPWCLLAWPGFLIQQVWPGWDFAFLECSPFLLMLLVQGPHFENHWFASSSPSP

SEQ ID NO: 3233 - protein, 555 aa, Homo sapiens
MWEQEEKMWEQEEKMWEQQRLPEQKEKLWEHEKMQEQEKMQEQEEKIWEQEKMRDQEEKMWGQEEKMWGQEEKMWGQEEKMREQEDVETGGEAAGAGEADVGAGGEDAEAGGEDAGSGAEDVGPEGEDVGAGREAAGEGGENAGAEDVAAGGEDAGGEEDAGAGEEDMGPGEDARGGEHAGAGEEDAGGGGDDAGAGGEDAGAGRKDAGAGGGDVGAGGEDVGAGREDVGAAEATGTEGEAVGTREDAGAGEDMGAGGEDAGPGGEDAGPGGEDAGAGGEDAGAGGEDVGAGGEDVGAGGEDVGPGGEDVGAGGEDVGPGGEDAGGRRRRCGGRRRRCGARRRRCGGRRRRCGGQEEKMRGAGGEDAGDRRRRCGGQEEKMREQEEKMREQEEKMQGQEEKMREQEEKMRGQEEKMREQEEKMRGQEEKMWGQEEKMWGQEEKMWGQEEMMREKEERIRDQKEKMQERLPEHEERCSEPCLPPSKVLCNMSHTGSVEPAGGEAGEGSPQDNPTAQEIMQLFCGMKNAQQCPGLGSTSCIPFFYRGDKRKMKIINI

SEQ ID NO: 3234 - protein, 114 aa, Homo sapiens
MEHAVEEVKNSLQLFEEYFLQDKMFITGNQISLADLVAVVEMMQPMAANYNVFLNSSKLAEWRMRVELNIGCGLFREAHDRLMQLADWDFSTLDPMVTRKICRARWLTPVIPAL

SEQ ID NO: 3235 - protein, 774 aa, Homo sapiens [sequence omitted]

SEQ ID NO: 3236 - protein, 197 aa, Homo sapiens
MNKVELESLLEGLTDEINFLRQLYEEEIWELQSQISDTSVVLSMDSSRSLDMDSIIPEVKAQYKEIANGSWAEAEGMHQIKYEELQTLPGKHRNDLRYAKMEISEINRNISRLQAQTEGLKGQRVSLEAATADAEQYGELAVKDANTKLSSWRPPCSGPSKTWCSSCAMEHQELMNVKLALDIKIATYRKLLEGEES

SEQ ID NO: 3237 - protein, 230 aa, Homo sapiens
MHQAQFPMTSGNLCATAKLRHHSSRWLRRSGAFSSGSTLKPPPSPSPAPLCHADNLRTGRTRSPGAARSPLKSSLSDPRPFPGHPFRRTCGARAVPTGCFTGQEGTWNPPPGPCPSARHLIPAGPPGWSSSRLWRVPRPCAAAPCARRSSPPGTSTPAPTCVPLAPKLPPYVWVASEMWGRRHSRKKGIRGASTSSEHFIPQDATRSLSWRSRSVHRVLFPWKMCTLETA

SEQ ID NO: 3238 - protein, 186 aa, Homo sapiens
MRIFVKTLTGKIITLEVEPSATIENVKAKIQDKEGNPCDQQRLIFAGKQREDGRSLSDYNIQKESTLHLVLRRRGGMQIFVKTLTGKTITLEVEPSDTIENVKAKIQDKEGIPPDQQRLIFAGKQLEDGRSLSDYNIQKESTLHLVLRLRGGMQIFVKTLTGKTITQLQWLSQSESGFSRERNRSN

SEQ ID NO: 3239 - protein, 403 aa, Homo sapiens
MKPVKKKKTEEPELEPLCCCEYIDRNGEKNHVATCLCDCQDLDEGCDRWITCKSLQPETCERIMDTISDRLRIPWLRGAKKVNISIIPPLVLLPVFLHVASWHFLLGVVVLTSLPVLALWYYYLTHRRKEQTLFFLSLGLFSLGYMYYVFLQEVVPKGRVGPVQLAVLTCGLFLILLALHRAKKNPGYLSNPASGDRSLSSSQLECLSRKGQEKTKGFPGADMSGSLNNRTTKDDPKGSSKMPAGSPTKAKEDWCAKCQLVRPARAWHCRICGICVRRMDHHCVWINSCVGESNHQAFILALLIFLLTSVYGITLTLDTICRDRSVFTALFYCPGVYANYSSALSFTCVWYSVIITAGMAYIFLIQLINISYNVTEREVQQALRQKTGRRLLCGLIVDTGLLG

SEQ ID NO: 3240 - protein, 148 aa, Homo sapiens
MKKKKKKKKKKKKKKRKKKKKKKKKKKKKKKKKKKKKKKKKKKKKKKKKKKKKKKKKKKKKKKKKNKKKKKKKKKKKKKKKRKKKKKKKKKRRKRRRRRRRRRRRRRRRRRRRRRRRRRRRRRRRKEGKLTLYHALYVPDICYVTQLI

SEQ ID NO: 3241 - protein, 265 aa, Homo sapiens
MVSRPRSPSAFPAPWWGQQPGGPGPAKRLRLEEPAGPEPRAAPSLEDPAGDPAVDALTSIVVLAAGCALRVPLDDVDLVLEPAPTSILRVSLGGHTLILIPEVLLSSVDERSGAQHDSSAGLEVDVFLGAVREDVVVELEFCASVPEIAAQEEAYEEDADPEFPELRMDSPTGSAAGLYPSSRSMFIPYREGPIPEPCALAPNPSSERRSPRPIFDLEFRLLEPVPSSPLQPLPPSPCVGSPGPHARSPLPERPPCKARRRLFQA

SEQ ID NO: 3242 - protein, 232 aa, Homo sapiens [sequence omitted]

SEQ ID NO: 3243 - protein, 568 aa, Homo sapiens
MTGCPASSRRRGFGLFFFLRLHRLLLLFLVLRGTLANKLNVPQVLLPFGREPGRVPFLLEAQRGCYTWHSTHHDAVTVEPLYENGTLCSQKAVLIAESTQPIRLSSIILAREIVTDHELRCDVKVDVINSIEIVSRARELYVDDSPLELMVRALDAEGNTFSSLAGMMFEWSIAQDNESAREELSSKIRILKYSEAEYAPPIYIAEMEKEEKQGDVILVSGIRTGAAVVKVRIHEPFYKKVAAALIRLLVLENIFLIPSHDIYLLVGTYIKYQVAKMVQGRVTEVKFPLEHYILELQDHRVALNGSHSEKVAILDDKAAMVTASQLGQTNLVFVHKNVHMRSVSGLPNCTIYVVEPGFLGFTVQPGNRWSLEVGQVYVITVDVFDKSSTKVYISDNLRITYDFPKEYFEEQLTTVNGSYHIVKALKDGVVVINASLTSIIYQNKDIQPIKFLIKHQQEVKIYFPIMLTPKFLAFPHHPMGMLYRYKVQVEGGSGNFTWTSSNETVIIVTTKGVVTAGQVRGNSTVLARDVQNPFRYGEIKIHVLKLNKMELLPFHADVEIGQIIEIPI

SEQ ID NO: 3244 - protein, 382 aa, Homo sapiens
MATLFYGLIDQTREFLHAAETPVPSVGEYLKKEIGQHVAGWTEDEETRKLKLAVLNSFFNLECCVSGTHSMDLVALAPFGEYTVLPGLDCTFSKGYQGLTNCMMAALPEDTVVFEKPVKTIHWNGSFQEAAFPGETFPVSVECEDGDRFPAHHVIVTVPLGFLREHLDTFFDPPLPAEKAEAIRKIGFGTNNKIFLEFEEPFWEPDCQLIQLVWEDTSPLEDAAPELQDAWFRKLIGFVVLPAFASVHVLCGFIAGLESEFMETLSDEEVLLCLTQVLRRVTGNPRLPAPKSVLRSRWHSAPYTRGSYSYVAVGSTGGDLDLLAQPLPADGAGAQLQILFAGEATHRTFYSTTHGALLSGWREADRLLSLWAPQVQQPRPRL

SEQ ID NO: 3245 - protein, 135 aa, Homo sapiens [sequence omitted]

SEQ ID NO: 3246 - protein, 135 aa, Homo sapiens
MVATWGGRQLLPQGSGPPLTPGSPAPSVAQASRPAPPSPRKTSPGPPQPSASPSLPFSPLLAGCSRLLPVLAPSLSSVHRCPLGARASRLPWKLEAGTSSSGDRPLCLHSGQRGACLTDEQGSTLSPRQRRGPGK

SEQ ID NO: 3247 - protein, 230 aa, Homo sapiens
MNNILTSATEPYDLSFSRSFQNLAHLPPSYESAVKTNPSKYSSLKRLTDKEADEYYMRRRHLPDLAARGTLPLNVIQMSQQKPLPRERPRRPIRAMSQDRVLSPDRGLPDEFSMPYDRILSDEQLLSTERLHSQDPLLSPERTAFPEQSLSRAISHTDVFVSTPVLDRYRMSKMHSHPSASNNSYATLGQSQTAAKRHAFASRRHNTVEQLHYIPGHHTCYTASKTEVTV

SEQ ID NO: 3248 - protein, 122 aa, Homo sapiens
MPPHRPCCGQSHPGRAHSPQARATWFQTSTPIQGPGTPTTLPLSEVFAACFRRKEKLPLSTGKTAHLLPPSPSPPPPPSVFPVSQNPIRCSLWTGIRILGISSFQDSLLHVPLLPPSSTFHR

SEQ ID NO: 3249 - protein, 219 aa, Homo sapiens [sequence omitted]

SEQ ID NO: 3250 - protein, 633 aa, Homo sapiens
MLRRGYKASERRRHLSERLSWHQDQALSSSIYLLREMGPTGFLLREEEPEYMDFRVFLGNPHVCNCSTFPKGGELCKHICWVLLKKFKLPRNHESALQLGLGEREISDLLRGIHRVQTPQPGTNDENEHVEEDGYIKQKEIDSEDICSICQELLLEKKLPVTFCRFGCGNSIHIKCMKILANYQSTSNTSMLKCPLCRKEFAPLKLILEEFKNSSKLVAAAEKERLDKHLGIPCNNCKQFPIEGKCYKCTECIEYHLCQECFDSCCHLSHTFTFREKRNQKWRSLEKRADEVVKYIDTKNEIEEKMSHFQEKQGQVYTPKHIVRSLPLQLITKNSKLLAPGYQCLLCLKAFHLGQHTRLLPCTHKFHRKCIDNWLFHKCNSCPIDGQVIYNPLTWKNSAVNGQAHQSVSNRDIIHLSKQKEPDLFIPGTGLVLKQNRLGILPSIPQCNFDELNTPQSPKDAYENTTIDNLCSIKLDNSNSKKLTYDYKISQHFPRYLQDLPTVSFGKIPSQTLLPPIVHKNIVCPTAMESPCISGKFHTSLSRMTKGCKCNNHNLKKTPATKIREDNKRSTLLPEDFNLIVNWSTAKLSLSKRYSNCMGEITRKCSHLSRQPVSHSVNTKSTELSLIIEGVQL

SEQ ID NO: 3251 - protein, 147 aa, Homo sapiens [sequence omitted]

SEQ ID NO: 3252 - protein, 119 aa, Homo sapiens
MKKHDPDFLGCPGRACWSTGLVAKAPRCAHPSSPHLHAAPGVSQSGLCGLKPIRAGGWACLVGARRWWQSRYRVFPSSSPLPSFLPLSALLQALSLCSQLPQRRCSIMFSPRETGSTYF

SEQ ID NO: 3253 - protein, 175 aa, Homo sapiens
MQSQAGRARPAQPGFPLQDCAPPHVHAGWDCNPVALQLKNWELIKDDKSQYARRSSRPPIHTFPSPEQFCHAKGEPGCSRTSLACQVTARPGGLSYRVIMSLPLPEMLASCFVIARSLISHGAAGDLELLAKLSRLPYLGAVLAPPLLLAPLLPSALPLPSAPPLRLAPPLTRPL

SEQ ID NO: 3254 - protein, 375 aa, Homo sapiens [sequence omitted]

SEQ ID NO: 3255 - protein, 211 aa, Homo sapiens
MAQPPPDVEGDDCLPAYRHLFCPDLLRDKVAFITGGGSGIGFRIAEIFMRASEDQMGHCSSSGTCLAGVATFMVIVGKQPPNQKSRETKEQGRQIPFVCVRHGCHTVIASRSLPRVLTAARKLAGATGRRCLPLSMDVRAPPAVMAAVDQALKEFGRIDILINCSSSSCGLPFCRCGRELPVPRWRLVLQRLQDRDGHRYQRHLQCVSCAL

SEQ ID NO: 3256 - protein, 304 aa, Homo sapiens
METLHIIYSEAKSFTVEGLSSRTRVRELQGQIAAITGIAPGGQRIFVGYPPECLDLSNGDTILEDLPIQSGDMLIIEEDQTRPRSSPAFTKRGASSYVRETLPVLTRTVVPADNSCLFTSVYYVVEGGVLNPACAPEMRRLIAQIVASDPDFYSEAILGKTNQEYCDWIKRDDTWGGAIEISILSKFYQCEICVVDTQTVRIDRFGEDAGYTKRVLLIYDGIHYDPLQRNFPDPDTPPLTIFSSNDDIVLVQALELADEARRRRQFTDVNRFTLRCMVCQKGLTGQAEAREHAKETGHTNFGEV

SEQ ID NO: 3257 - protein, 302 aa, Homo sapiens
MVHQRIASWQNLGAVYCSTVVPSDDVTVVYQNGLPVISVRLPSRRERCQFTLKPISDSVGVFLRQLQEEDRGIDRVAIYSPDGVRVAASTGIDLLLLDDFKLVINDLTYHVRPPKRDLLSHENAATLNDVKTLVQQLYTTLCIEQHQLNKERELIERLEDLKEQLAPLEKVRIEISRKAEKRTTLVLWGGLAYMATQFGILARLTWWEYSWDIMEPVTYFITYGSAMAMYAYFVMTRQEYVYPEARDRQYLLFFHKGAKKSRFDLEKYNQLKDAIAQAEMDLKRLRDPLQVHLPLRQIGEKD

SEQ ID NO: 3258 - protein, 109 aa, Homo sapiens
MAAAKSGAGGASRPPLPLLREALSKRRTAPVTRPSRTATAALGKASTPAHRSAPSPEPPSISPPRGLASALSFPQSRLLVGRNQLRGDGGSGCGLHGHRSPEVANQRTE

SEQ ID NO: 3259 - protein, 595 aa, Homo sapiens
MILAPEGSSSGKLRIPAAQERDAGTYTCRAVNELGDASAEIQLAVGHAPQLTELPRDVTVELGRSALLACRATGRPPPTVTWRRGDGQPLGLRLGAGRGSRSRQPDSGVLFFESVAPEDQAPYVCEARNVFGKVQAEARLIVTGHAPPQIASSAPTVRVLEGQPVSLPCIVLAGRPLPERHWLKDGRPLPPGSRHSIRADGSLHLDRALQEHAGRYSCVATNTAGSQHRDVELVVQVPPRIHPTATHHITNEGVPASLPCVASGVPAPTITWTKETNALTSRGPHYNVSKEGTLLIAQPSAQDAGAYVCTATNTVGFSSQEMRLSVNTKPRIHMNGSRNADVPLQVTAKAGEEVTLDCEAKGSPPPLVTWTKDSRPVPPITNRYGLLPSGSLRLAQVQVGDSGHYECTASNPAGSASHRYVLGVQGRTSWQPQSLPVPHHPACLSGLSVPLLQPTPRSVRLCHLSLRAPLPPPFATPTSCLSQACLSSSTLSLHLSPYPLRGPGDAVQRPPTTQGRAQWGLGFGRTGVRGEPMKVGLRGSLPGTRGPAGSPGCGDGKRPVRCHRAPPAGSILMPPRGPSEPLLPPLPSTRHFVHL

SEQ ID NO: 3260 - protein, 244 aa, Homo sapiens [sequence omitted]

SEQ ID NO: 3261 - protein, 896 aa, Homo sapiens
MMAQKSQGSDNLQEGQEKSKREILKCTKSAWAPLDEWLPPDPEEESQSLTIPMLEDSKQESIQQWLDSGFFVSANENFQQVIDRTVSLYEQGMVQMTVKDYMRSLHQFSETPILSRGTSFNSCYSTASVPQSIPEWLEFWEIDPVEILLDLGFGADEPDICMQIPARFLGCGSAARGINIRVFLEAQKQRMDIENPNLYGRFRQLEILDHVTNAFSSLLSDVSILPNRAEEKAGGESVQRTSVQSFEEETGNPLDMTSGTVGARVDRANSCQSDSSGFLEEPLEPLPLQMPSLPNSQSPAENGGRKPRDQSHSLVSSQDCQLESDGPDSKSRASMSFSSQEVNALEQRASVSVMEEEFLLEAMEGPPELYIPDMACAKTTTRGECPRKDSHLWQLLPMPHAEYEVTRPTATSKYDHPLGFMVTHVTEMQDSFVRPEGAGKVQSHHNESQRSPGNDHTQDKFLHVDSEAPREEESSGFCPHTNHSLLVPESSSQCIPKHSEITPYATDLAQTSEKLIPHLHKLPGDPAQVKSRSGTLGQILPGTEAEMENLPLNTGSSRSVMTQMSSSLVSAAQRAVALGTGPRGTSLECTVCDPVTATETRLGTKARQLNDASIQTSALSNKTLTHGPQPLTKSVSLDSGFSSICPMGTCHAISAHCCICYHHHPHCHGERQSPGPEPSVCRHCLCSLTGHQEAQFMTTLKALQDTTVRELCSCTVHEMEAMKTICQSFREYLEEIEQHLMGQQALFSRDMSEEEREEAEQLQTLREALRQQVAELEFQLGDRAQQIREGILLQLEVLTAEPPEHYSNLHQYNWIEESNGQTSCSKIHPGMAPRTVFPPDDGQEAPCSGGTQLAAFTPPTLENSTRMSPSSSAWAKLGPTPLSNCPVGEKDADVFL

SEQ ID NO: 3262 - protein, 131 aa, Homo sapiens
MPQAAHSVSAVLEKAQTHAETSKDKKPALGNRQEHSGPRTAPSPACPASSGAEVQGYQQQPRHAPPRPRTQAAGASPPCQTTSCRHSHHPWTTQSSRRPWTSCSLPPRSPRGLLMPHPRKRHEASMFRSSK

SEQ ID NO: 3263 - protein, 167 aa, Homo sapiens
MPMKPPRCTRTSRSSCSRTTLRPAASPNTTSSRGQTVHPPCSSKLRMDPTPAWPASCEALMGPSSSAGPARLRLPPRRHSSLPPRRASFLIVSRASKSWECAGPVPALPGGVVAVPTSQQDPQCRGSQVAHRRCLSRAILQSGPQCQSCLSIWVTSARSRVQASSRS

SEQ ID NO: 3264 - protein, 2427 aa, Homo sapiens
MQSSPSPAHPQLPVLQTQMVSDGMTGSNPVSPASSSSPASSGAGGISPQHIAQDSSLDGPPGPPDGATVPLEGFSLSQAADLANKGPKWEKSHAEIAEQAKHEAEIETRIAELRKEGFWSLKRLPKVPEPPRPKGHWDYLCEEMQWLSADFAQERRWKRGVARKVVRMVIRHHEEQRQKEERARREEQAKLRRIASTMAKDVRQFWSNVEKVVQFKQQSRLEEKRKKALDLHLDFIVGQTEKYSDLLSQSLNQPLTSSKAGSSPCLGSSSAASSPPPPASRLDDEDGDFQPQEDEEEDDEETIEVEEQQEGNDAEAQRREIELLRREGELPLEELLRSLPPQLLEGPSSPSQTPSSHDSDTRDGPEEGAEEEPPQVLEIKPPPSAVTQRNKQPWHPDEDDEEFTANEEEAEDEEDTIAAEEQLEGEVDHAMELSELAREGELSMEELLQQYAGAYAPGSGSSEDEDEDEVDANSSDCEPEGPVEAEEPPQEDSSSQSDSVEDRSEDEEDEHSEEEETSGSSASEESESEESEDAQSQSQADEEEEDDDFGVEYLLARDEEQSEADAGSGPPTPGPTTLGPKKEITDIAAAAESLQPKGYTLATTQVKTPIPLLLRGQLREYQHIGLDWLVTMYEKKLNGILADEMGLGKTIQTISLLAHLACEKGNWGPHLIIVPTSVMLNWEMELKRWCPSFKILTYYGAQKERKLKRQGWTKPNAFHVCITSYKLVLQDHQAFRRKNWRYLILDEAQNIKNFKSQRWQSLLNFNSQRRLLLTGTPLQNSLMELWSLMHFLMPHVFQSHREFKEWFSNPLTGMIEGSQEYNEGLVKRLHKVLRPFLLRRVKVDVEKQMPKKYEHVIRCRLSKRQRCLYDDFMAQTTTKETLATGHFMSVINILMQLRKVCNHPNLFDPRPVTSPFITPGICFSTASLVLRATDVHPLQRIDMGRFDLIGLEGRVSRYEADTFLPRHRLSRRVLLEVATAPDPPPRPKPVKMKVNRMLQPVPKQEGRTVVVVNNPRAPLGPVPVRPPPGPELSAQPTPGPVPQVLPASLMVSASPAGPPLIPASRPPGPVLLPPLQPNSGSLPQVLPSPLGVLSGTSRPPTPTLSLKPTPPAPVRLSPAPPPGSSSLLKPLTVPPGYTFPPAAATTASTTTATATTTAVPAPTPAPQRLILSPDMQARLPSGEVVSIGQLASLAQRPVANAGGSKPLTFQIQGNKLTLTGAQVRQLAVGQPRPLQRNVVHLVSAGGQHHLISQPAHVALIQAVAPTPGPTPVSVLPSSTPSTTPAPTGLSLPLAANQVPPTMVNNTGVVKIVVRQAPRDGLTPVPPLAPAPRPPSSGLPAVLNPRPTLTPGRLPTPTLGTARAPMPTPTLVRPLLKLVHSPSPEVSASAPGAAPLTISSPLHVPSSLPGPASSPMPIPNSSPLASPVSSTVSVPLSSSLPISVPTTLPAPASAPLTIPISAPLTVSASGPALLTSVTPPLAPVVPAAPGPPSLAPSGASPSASALTLGLATAPSLSSSQTPGHPLLLAPTSSHVPGLNSTVAPACSPVLVPASALASPFPSAPNPAPAQASLLAPASSASQALATPLAPMAAPQTAILAPSPAPPLAPLPVLAPSPGAAPVLASSQTPVPVMAPSSTPGTSLASASPVPAPTPVLAPSSTQTMLPAPVPSPLPSPASTQTLALAPALAPTLGGSSPSQTLSLGTGNPQGPFPTQTLSLTPASSLVPTPAQTLSLAPGPPLGPTQTLSLAPAPPLAPASPVGPAPAHTLTLAPASSSASLLAPASVQTLTLSPAPVPTLGPAAAQTLALAPASTQSPASQASSLVVSASGAAPLPVTMVSRLPVSKDEPDTLTLRSGPPSPPSTATSFGGPRPRRQPPPPPRSPFYLDSLEEKRKRQRSERLERIFQLSEAHGALAPVYGTEVLDFCTLPQPVASPIGPRSPGPSHPTFWTYTEAAHRAVLFPQQRLDQLSEIIERFIFVMPPVEAPPPSLHACHPPPWLAPRQAAFQEQLASELWPRARPLHRIVCNMRTQFPDLRLIQYDCGKLQTLAVLLRQLKAEGHRVLIFTQMTRMLDVLEQFLTYHGHLYLRLDGSTRVEQRQALMERFNADKRIFCFILSTRSGGVGVNLTGADTVVFYDSDWNPTMDAQAQDRCHRIGQTRDVHIYRLISERTVEENILKKANQKRMLGDMAIEGGNFTTAYFKQQTIRELFDMPLEEPSSSSVPSAPEEEEETVASKQTHILEQALCRAEDEEDIRAATQAKAEQVAELAEFNENDGFPAGEGEEAGRPGAEDEEMSRAEQEIAALVEQLTPIERYAMKFLEASLEEVSREELKQAEEQVEAARKDLDQAKEEVFRLPQEEEEGPGAGDESSCGTGGGTHRRSKKAKAPERPGTRVSERLRGARAETQGANHTPVISAHQTRSTTTPP

SEQ ID NO: 3265 - protein, 1385 aa, Homo sapiens
MAPGPIELRAHAILVSDGGELRIGSEDKPFQGRAQITLYGSSYSTPFFPYGVKFLAVRNGTLSLHGSLPEVIVTCLRATAHALDTVLALEDAVDWNPGDEVVIISGTGVKGAKPMEEIVTVETVQDTDLYLKSPLRYSHNFTENWVAGEHHILKATVALLSRSITIQGNLTNEREKLLVSCQEANAPEGNLQHCLYSMSEKMLGSRDMGARVIVQSFPEEPSQVQLKGVQFQVLGQAFHKHLSSLTLVGAMRGTCTEMRYISWEAIHGRKDDWSGHGNIIRNNVIIQVSGAEGLSNPEMLTPSGIYICSPTNVIEGNRVCGAGYGYFFHLMTNQTSQAPLLSFTQNIAHSCTRYGLFVYPKFQPPWDNVTGTTLFQSFTVWESAGGAQIFRSSNLRLKNFKVYSCRDFGIDVLESDANTSVTDSLLLGHFAHKGSLCMSSGIKTPKRWELMVSNTTFVNFDLINCVAIRTCSDCSQGQGGFTVKTSQLKFTNSSNLVAFPFPHAAILEDLDGSLSGKNRSHILASMETLSASCLVNSSFGRVVHGSACGGGVLFHRMSIGLANTPEVSYDLTMTDSRNKTTTVNYVRDTLSNPRGWVALLLDQETYSLQSENLWINRSLQYSATFDNFAPGNYLLLVHTDLPPYPDILLRCGSRVGLSFPFLPSPGQNQGCDWFFNSQLRQLTYLVSGEGQVQVILRVKEGMPPTISASTSAPESALKWSLPETWQGVEEGWGGYNNTIPGPGDDVLILPNRTVLVDTDLPFFKGLYVMGTLDFPVDRSNVLSVACMVIAGGELKVGTLENPLEKEQKLLILLRASEGVFCDRMNGIHIDPGTIGVYGKVHLYSAYPKNSWTHLGADIASGNERIIVEDAVDWRPHDKIVLSSSSYEPHEAEVLTVKEVKGHHVRIYERLKHRHIGSVHVTEDGRHIRLAAEVGLLTRNIQIQPDVSCRGRLFVGSFRKSSREEFSGVLQLLNVEIQNFGSPLYSSVEFSNVSAGSWIISSTLHQSCGGGIHAAASHGVLLNDNIVFGTAGHGIDLEGQAYTVTNNLVVLMTQPAWSTIWVAGIKVNQVKDINLHGNVVAGSERLGFHIRGHKCSSCELLWSDNVAHSSLHGLHLYKESGLDNCTRISGFLAFKNFDYGAMLHVENSVEIENITLVDNTIGLLAVVYVFFAPQNSVKKVQIVLRNSVIVATSSSFDCIQDKVKPHSANLTSTDRAPSNPRGGRIGILWPVFTSEPNQWPQEPWHKVRNDHSISGIMKLQDVTFSSFVKSCYSDDLDVCILPNAENSGIMHPITAERTRMLKIKDKNKFYFPSLQPRKDLGKVVCPELDCASPRKYLFKDLDGRALGLPPPVSVFPKTEAEWTASFFNAGLLGTKEEFPYVLYPLP

SEQ ID NO: 3266 - protein, 120 aa, Homo sapiens [sequence omitted]

SEQ ID NO: 3267 - protein, 130 aa, Homo sapiens
MHTLACVSLLEPHQAGPLPGTKFFLFLSFFFFLFLSFSFSFFLFSLPSFLPSFLPSFLPSFPFLFFSFYCDMILAHCNLSLLGSSDSTASASKVAGITGLHHHARLIFCIFSRDSVSPCWPGWSPSPDLR

SEQ ID NO: 3268 - protein, 681 aa, Homo sapiens [sequence omitted]

SEQ ID NO: 3269 - protein, 133 aa, Homo sapiens [sequence omitted]

SEQ ID NO: 3270 - protein, 1111 aa, Homo sapiens
MIESENLNQEEIIKELCLCNGLSYEMVGQEGSDTSKLEMFFLGYPRIVGLSLFPNLTSLTIVAQDIKEISGLEPCLQLKELWIAECRIEKIEGLQECRNLEKLYLYFNKISKIENLEKLIKLKVLWLNHNTIKNIEGLQTLKNLKDLNLAGNLINSIGRCLDSNEQLERLNLSGNQICSFKELTNLTRLPCLKDLCLNDPQYTTNPVCLLCNYSTHVLYHLPCLQRFDTLDVSAKQIKELADTTAMKKIMYYNMRIKTLQRHLKEDLEKLNDQKCKLQKLPEERVKLFSFVKKTLERELAELKGSGKGHSDGSNNSKVTDPETLKSCETVTEEPSLQQKILAKLNALNERVTFWNKKLDEIEAIYHIEVKQKKKSHGLLIPLLLIELETVGNFHFEEGTRSDDWFNFCYELILSRFCAWDFRTYGITGVKVKRIIKVNNRILRLKFEEKFQKFLENEDMHDSESYRRMLECLFYVFDPEVSVKKKHLLQILEKGFKDSETSKLPLKKEAIIVSNSLSISECPRIEFLQQKHKDEKKISLKHELFRHGILLITKVFLGQSVQAHEKESISQSNYPMVNSVFIPRKYLLNSVMGQRNCDCSVRQCKWFVFDHDLVLPEYVVEFEYITMVKPPSLFSVFNNVILEESKKNPEVSVFSKDLKFDDEVIKMEPRIKARPKLISLDDKTILSLAKTSVYSHIVSLNLHGNSLSKLRDLSKLTGLRKLNISFNEFTCLDDVYHLYNLEYLDASHNHVITLEGFRGLMKLKHLDLSWNQLKKSGNEINMLCKHTTSLLTLDIQHNPWQKPATLRLSVIGRLKTLTHLNGVFISEEEATAAMKFIAGTRITQLSLLRHSSTKEERPRILSIWPSAKILTQVSKLGPHLHLSGNCYLKITALNLDGQHLFEITNLEKLENLKWASFSNNNLTKMEGLESCINLEELTLDGNCISKIEGISKMTKLTRLSINNNLLTGWEEHTFDNMLHLHSLSLENNRITSLSGLQKSFTLVELYISNNYIAVNQEMHNLKGLCNLVILDMCGNIIIWNQENYRLFVIFHLPELKALDGIPIEPSETDSAKDLFGGRLTSDMIAERQGHSNFKQMQELNWTSSSISCIYFV

SEQ ID NO: 3271 - protein, 190 aa, Homo sapiens
MSTRKRRGGAINSRQAQKRTREATSTPEISLEAEPIELVETAGDEIVDLTCESLEPVVVDLTHNDSVVIVDERRRPRRNARRLPQDHADSCVVSSDDEELSRDRDVYVTTHTPRNARDEGATGLRPSGTVSCPICMDGYSEIVQNGRLIVSTECGHVFCSQCLRDSLKNANTCPTCRKKINHKRYHPIYI

SEQ ID NO: 3272 - protein, 144 aa, Homo sapiens [sequence omitted]

SEQ ID NO: 3273 - protein, 245 aa, Homo sapiens [sequence omitted]

SEQ ID NO: 3274 - protein, 706 aa, Homo sapiens
MRVLSGQRQQQPADKKRRRVLCAGCRATLRAAVRASVSECCVPGEAQGGPAGIRVRVLCAGRCSGRPCGHPCQSAVCRAELRAALRASMSECCVPGDAQGGRAGIHVRVLCAGRQSGQPCGHPCQSAVCRATLRAAVRASMSECCVPGGAQGGPAGICVRVLCAGRSSGRPCGHPCQSAVCRAELRAALRASVSECCVPGDAQGGRAGIHVRVLCAGRRSGRPCGHLCQSAVCRTKLRAALRASVSECCVPGDAQGGCAGICVRVLCAGRRSGRPCGHPCQSAVCRAMLRAALRASMSECCVPGDAQGGPAGIHVRVLCARRCSGRPCGHPCQSAVCRAELRAAVWASVLAFCVPGDAQGGPAGICVRVLCAGRCSGQPCRHPCQSAVCRATVRAAVRASVSECCVPGDAQGSRAGIHVRVLCAGRQSGQPCGHPCQSAVCRAMLRAAVQASMSECCVPGDSQGSRAGIRVRVLCAGRRSGQPCGHPCQSAVCRATLRAAVRASMSECCVPGDAQGGRAGIHVRVLCAGRQSGQPCGHPCQSAVCRAMLRAAVRASVSECCVPGDAQGGRLGIRVRVLCAGRLSGRPCGHPCQRSVCRATLRAAVRASVSECCVPGDSQGSRAGIRVRVLCAGRLSGRPCGHPCQSAVCRATLRAAVWASVSECCVPGDAQGGCVSIRVRWAAGCWGVTDSPLGLRAGGLLASTWV

SEQ ID NO: 3275 - protein, 170 aa, Homo sapiens [sequence omitted]

SEQ ID NO: 3276 - protein, 145 aa, Homo sapiens
MKHQTQCRRGGREEMKHQTQCRRGPWEEMKHQTQCRRGGREDLKHQTQCRRGGREDLKHQTQCRRGGREEMKHQTQCRRGGREEMKHQTQCRRGGREDLKHQTQCRRGGREEMKDQTQCRRGGWEEMKHQLCEISGFGEKPLVSG

SEQ ID NO: 3277 - protein, 741 aa, Homo sapiens
MPYRRVTSGRLLSLAAPKMASIMEGPLSKWTNVMKGWQYRWFVLDYNAGLLSYYTSKDKMMRGSRRGCVRLRGAVIGIDDEDDSTFTITVDQKTFHFQARDADEREKWIHALEETILRHTLQLQGLDSGFVPSVQDFDKKLTEADAYLQILIEQLKLFDDKLQNCKEDEQRKKIETLKETTNSMVESIKHCIVLLQIAKSTINPVDAIYQPSPLEPVISTMPSQTVLPPEPVQLCKSEQRPSSLPVGPVLATLGHHQTPTPNSTGSGHSPPSSSLTSPSHVNLSPNTVPEFSYSSSEDEFYDADEFHQSGSSPKRLIDSSGSASVLTHSSSGNSLKRPDTTESLNSSLSNGTSDADLFDSHDDRDDDAEAGSVEEHKSVIMHLLSQVRLGMDLTKVVLPTFILERRSLLEMYADFFAHPDLFVSISDQKDPKDRMVQVVKWYLSAFHAGRKGSVAKKPYNPILGEIFQCHWTLPNDTEENTELVSEGPVPWVSKNSVTFVAEQVSHHPPISAFYAECFNKKIQFNAHIWTKSKFLGMSIGVHNIGQGCVSCLDYDEHYILTFPNGYGRSILTVPWVELGGECNINCSKTGYSANIIFHTKPFYGGKKHRITAEIFSPNDKKSFCSIEGEWNGVMYAKYATGENTVFVDTKKLPIIKKKVRKLEDQNEYESRSLWKDVTFNLKIRDIDAATEAKHRLEERQRAEARERKEKEIQWETRLFHEDGECWVYDEPLLKRLGAAKH

SEQ ID NO: 3278 - protein, 1135 aa, Homo sapiens [sequence omitted]

SEQ ID NO: 3279 - protein, 1281 aa, Homo sapiens
MSSSRAQQMHAFSWIRNTLEEHPETSLPKQEVYDEYKSYCDNLGYHPLSAADFGKIMKNVFPNMKARRLGTRGKSKYCYSGLRKKAFVHMPTLPNLDFHKTGDGLEGAEPSGQLQNIDEEVISSACRLVCEWAQKVLSQPFDTVLELARFLVKSHYIGTKSMAALTVMAAAPAGMKGITQPSAFIPTAESNSFQPQVKTLPSPIDAKQQLQRKIQKKQQEQKLQSPLPGESAAKKSESATSNGVTNLPNGNPSILSPQPIGIVVAAVPSPIPVQRTRQLVTSPSPMSSSDGKVLPLNVQVVTQHMQSVKQAPKTPQNVPASPGGDRSARHRYPQILPKPANTSALTIRSPTTVLFTSSPIKTAVVPASHMSSLNVVKMTTISLTPSNSNTPLKHSASVSSATGTTEESRSVPQIKNGSVVSLQSPGSRSSSAGGTSAVEVKVEPETSSDEHPVQCQENSDEAKAPQTPSALLGQKSNTDGALQKPSNEGVIEIKATKVCDQRTKCKSRCNEMLPGTSTGNNQSTITLSVASQNLTFTSSSSPPNGDSINKDPKLCTKSPRKRLSSTLQETQVPPVKKPIVEQLSAATIEGQKQGSVKKDQKVPHSGKTEGSTAGAQIPSKVSVNVSSHIGANQPLNSSALVISDSALEQQTTPSSSPDIKVKLEGSVFLLDSDSKSVGSFNPNGWQQITKDSEFISASCEQQQDISVMTIPEHSDINDLEKSVWELEGMPQDTYSQQLRSQIQESSLNQIQAHSSDQLPLQSELKEFEPSVSQTNESYFPFDDELTQDSIVEELVLMEQQMSMNNSHSYGNCLGMTLQSQSVTPGAPMSSHTSSTHFYHPIHSNGTPIHTPTPTPTPTPTPTPTPTPTSEMIAGSQSLSRESPCSRLAQTTPVDSALGSSRHTPIGTPHSNCSSSVPPSPVECRNPFAFTPISSSMAYHDASIVSSSPVKPMQRPMATHPDKTKLEWMNNGYSGVGNSSVSGHGILPSYQELVEDRFRKPHAFAVPGQSYQSQSRHHDTHFGRLTPVSPVQHQGATVNNTNKQEGFAVPAPLDNKGTNSSASSNFRCRSVSPAVHRQRNLSGSTLYPVSNIPQSNVTPFGSPVTPEVHVFTNVHTDACANNIAQRSQSVPLTVMMQTAFPNALQKQANSKKITNVLLSKLDSDNDDAVRGLGMNNLPSNYTARMNLTQILEPSTVFPSANPQNMIDSSTSVYEFQTPSYLTKSNSTGQINFSPGDNQAQSEIGEQQLDFNSTVKDLLSGDSLQTNQQLCSCPSSLLAGMQM

SEQ ID NO: 3280 - protein, 129 aa, Homo sapiens [sequence omitted]

SEQ ID NO: 3281 - protein, 105 aa, Homo sapiens [sequence omitted]

SEQ ID NO: 3282 - protein, 198 aa, Homo sapiens [sequence omitted]

SEQ ID NO: 3283 - protein, 102 aa, Homo sapiens
MNLEEMAHSSSAVDLTMSPGLIIGKSFAKKNEYGGETIYLEELFKISKLGHETWWQRLAAPGKSAMGCAGTSRLVRSLACQVMSTQTVDIGWGLAAKINFSH

SEQ ID NO: 3284 - protein, 496 aa, Homo sapiens
MLHTEGHALLRAVGQGKLRLARLLLEGGAYVNEGDAQGETALMAACRARYDDPQNKARMVRYLLEQGADPNIADRLGRTALMHACAGGGGAAVASLLLAHGADPSVRDHAGASALVHALDRGDRETLATLLDACKAKGTEVIIITTDTSPSGTKKTRQYLNSPPSPGVEDPAPASPSPGFCTSPSEIQLQTAGGGGRGMLSPRAQEEEEKRDVFEFPLPKPPDDPSPSEPLPKPPRHPPKPLKRLNSEPWGLVAPPQPVPPTEGRPGIERLTAEFNGLTLTGRPRLSRRHSTEGPEDPPPWAEKVTSGGPLSRRNTAPEAQESGPPSGLRQKLSRMEPVELDTPGHLCPDSPESSRLSLERRRYSASPLTLPPAGSAPSPRQSQESLPGAVSPLSGRRRSPGLLERRGSGTLLLDHISQTRPGFLPPLNVSPHPPIPDIRPQPGGRAPSLPAPPYAGAPGSPRTKRKLVRRHSMQTEQIRLLGGFQSLGGPGEPGR

SEQ ID NO: 3285 - protein, 1636 aa, Homo sapiens
MWVALFYSNQNKIIRSSRKVVEHSNPAKYVSINSTLESCELREIEESLGLEKCSADSLLETNEISRAHAAEVSFRDPNCLLPFIKTPLTQGLELCVQNEQKKTFARECDPDTQEDQNFICSYNNEVTGEEAKQESLETSNLVLSGIGSTQTNGPSVPSEEEIVQPLDSTRVASYSGTVTQATFTRTYDGPGSQPVICQSSVYGTLENKVDILDAAVQTKTGTLQDLIQHGSPINNECHPSLERKDDNMGCAVINPEPITLTFEKNAHVPIQTEGVNTADEPTTFKKELIKQVSPAASLRHPVSTSENARTQGLRDIPSLVVAGQKGTKYLCASSVGGETLDKAVCSLQKETPLPVSLPSDKTMVMEALSLAKSSSHLSPSEEVRCTQDFLSQTQSLLGLSSEGLLELTQVEVDSSSASTTLGRQCSLNCISSGCHTSGDSLELRKNHKNGPNTENMNLEAFDSVFIKQTSLSVSREVSLELSEEDSDIDLALTISPPTSPREEMPAGEIEQFEEAPFSNLELQDVAEEIGEPEEVALTESREVSSADNVSVYPSVSEEPVENKERKGDNLQPVTLILSKENCTLEIAEEINVTSDFPFDSVIEEVSPASSPEPPVPVKETRPYQAVTPCILKLHGTQCEKSNQISQCESEDLGITEKENVFVGPTHPVGQDNFTQVQQMQVSAEMPLILTDHPGRTGRPTLPGKVTEEIVSSEHDEGLSFSGKVQCYGRELNQPASAAKCTGDFSPSPEKLVKSGNPLQPVSIENRNLDLKHLVLESSEPPFGPRNVIENKSLSDTLVSTTAPSGIVNVSVKQQTSPKSSQNHLFPGDLKTDEGIYLQVKSLTAASVDGAYSTQGCMCSVVPTLCSSSDNATLTHYVRPINAEPAFQAQEIPAGRMASLLKNGEPEAELHKETTGPGTAGPQSNTTSSLKGERKAIHTLQDVSTCETKELLNVGVSSLCAGPYQNTADTKENLSKEPLASFVSESFDTSVCGIATEHVEIENSGEGLRAEAGSETLGRDGEVGVNSDMHYELSGDSDLDLLGDCRNPRLDLEDSYTLRGSYTRKKDVPTDGYESSLNFHNNNQEDWGCSSWVPGMETSLPPGHWTAAVKKEEKCVPPYVQIRDLHGILRTYANFSITKELKDTMRTSHGLRRHPSFSANCGLPSSWTSTWQVADDLTQNTLDLEYLRFAHKLKQTIKNGDSQHSASSANVFPKESPTQISIGAFPSTKISEAPFLHPAPRSRSPLLVTVVESDPRPQGQPRRGYTASSLDSSSSWRERCSHNRDLRNSQRNHTVSFHLNKLKYNSTVKESRNDISLILNEYAEFNKVMKNSNQFIFQDKELNDVSGEATAQEMYLPFPGRSASYEDIIIDVCTNLHVKLRSVVKEACKSTFLFYLVETEDKSFFVRTKNLLRKGGHTEIEPQHFCQAFHRENDTLIIIIRNEDISSHLHQIPSLLKLKHFPSVIFAGVDSPGDVLDHTYQELFRAGGFVISDDKILEAVTLVQLKEIIKILEKLNGNGRWKWLLHYRENKKLKEDERVDSTAHKKNIMLKSFQSANIIELLHYHQCDSRSSTKAEILKCLLNLQIQHIDARFAVLLTDKPTIPREVFENNGILVTDVNNFIENIEKIAAPFRSSYW

SEQ ID NO: 3286 - protein, 108 aa, Homo sapiens [sequence omitted]

SEQ ID NO: 3287 - protein, 654 aa, Homo sapiens
MATLACRVQFLDDTDPFNSTNFPEPSRPPLFTFREDLALGTQLAGVHRLLQAPHKLDDCTLQLSHNGAYLDLEATLAEQRDELEGFQDDAGRGKKHSIILRTQLSVRVHACIEKLYNSSGRDLRRALFSLKQIFQDDKDLVHEFVVAEGLTCLIKVGAEADQNYQNYILRALGQIMLYVDGMNGVINRNETIQWLYTLIGSKFRLVVKTALKLLLVFVEYSESNAPLLIQAVTAVDTKRGVKPWSNIMEILEEKDGVDTELLVYAMTLVNKTLSGLPDQDTFYDVVDCLEELGIAAVSQRHLNKKGTDLDLVEQLNIYEVALRHEDGDETTEPPPSGCRDRRRASVCSSGGGEHRGLDRRRSRRHSVQSIKSTLSAPTSPCSQSAPSFKPNQVRDLREKYSNFGNNSYHSSRPSSGSSVPTTPTSSVSPPQEARLERSSPSGLLTSSFRQHQESLAAERERRRQEREERLQRIEREERNKFRYKYLEQLAAEEHEKELRSRSVSRGRADLSLDLTSPAAPACLAPLSHSPSSSDSQEALTVSASSPGTPHHPQASAGDPEPESEAEPEAEAGAGQVADEAGQDIASAHEGAETEVEQALEQEPEERASLSEKERQNEGVNERDNCSASSVSSSSSTLEREEKEDKLSRDRTTGK

SEQ ID NO: 3288 - protein, 305 aa, Homo sapiens
MVCIVIGARKLGVNPDNIATPIAASLGDLITLSILALVSSFFYRHKDSRYLTPLVCLSFAALTPVWVLIAKQSPPIVKILKFGWFPIILAMVISSFGGLILSKTVSKQQYKGMAIFTPVICGVGGNLVAIQTSRISTYLHMWSAPGVLPLQMKKFWPNPYSTFCTSEINSMSARVLLLLVVPGHLIFFYIIYLVEGQSVINSQTFVVLYLLAGLIQVTILLYLAEVMVRLTWHQALDPDNHCIPYLTGLGDLLGSSSVGHTAAVPRRCTASPGWGLIQPFICTQHLIVSLLSFYFPFCLLAKTSI

SEQ ID NO: 3289 - protein, 1181 aa, Homo sapiens
MNLEAFDSVFIKQTSLSVSREVSLELSEEDSDIDLALTISPPTSPREEMPAGEIEQFEEAPFSNLELQDVAEEIGEPEEVALTESREVSSADNVSVYPSVSEEPVENKERKGDNLQPVTLILSKENCTLEIAEEINVTSDFPFDSVIEEVSPASSPEPPVPVKETRPYQAVTPCILKLHGTQCEKSNQISQCESEDLGITEKENVFVGPTHPVGQDNFTQVQQMQVSAEMPLILTDHPGRTGRPTLPGKVTEEIVSSEHDEGLSFSGKVQCYGRELNQPASAAKCTGDFSPSPEKLVKSGNPLQPVSIENRNLDLKHLVLESSEPPFGPRNVIENKSLSDTLVSTTAPSGIVNVSVKQQTSPKSSQNHLFPGDLKTDGGIYLQVKSLTAASVDGAYSTQGCMCSVVPTLCSSSDNATLTHYVRPINAEPAFQAQEIPAGRMASLLKNGEPEAELHKETTGPGTAGPQSNTTSSLKGERKAIHTLQDVSTCETKELLNVGVSSLCAGPYQNTADTKENLSKEPLASFVSESFDTSVCGIATEHVEIENSGEGLRAEAGSETLGRDGEVGVNSDMHYELSGDSDLDLLGDCRNPRLDLEDSYTLRGSYTRKKDVPTDGYESSLNFHNNNQEDWGCSSWVPGMETSLPPGHWTAAVKKEEKCVPPYVQIRDLHGILRTYANFSITKELKDTMRTSHGLRRHPSFSANCGLPSSWTSTWQVADDLTQNTLDLEYLRFAHKLKQTIKNGDSQHSASSANVFPKESPTQISIGAFPSTKISEAPFLHPAPRSRSPLLVTVVESDPRPQGQPRRGYTASSLDSSSSWRERCSHNRDLRNSQRNHTVSFHLNKLKYNSTVKESRNDISLILNEYAEFNKVMKNSNQFIFQDKELNDVSGEATAQEMYLPFPGRSASYEDIIIDVCTNLHVKLRSVVKEACKSTFLFYLVETEDKSFFVRTKNLLRKGGHTEIEPQHFCQAFHRENDTLIIIIRNEDISSHLHQIPSLLKLKHFPSVIFAGVDSPGDVLDHTYQELFRAGGFVISDDKILEAVTLVQLKEIIKILEKLNGNGRWKWLLHYRENKKLKEDERVDSTAHKKNIMLKSFQSANIIELLHYHQCDSRSSTKAEILKCLLNLQIQHIDARFAVLLTDKPTIPREVFENNGILVTDVNNFIENIEKIAAPFRSSYW

SEQ ID NO: 3290 - protein, 197 aa, Homo sapiens
MLPAHTWVGKGSHTLGLLMERGSEGRQEQPPRRPLRPRLDGSGPALPPDLCLSAARSSASPSRSTCTRSRSRPNSSSSRRSSRSSCWHSWSARAGSWPRAWLSSPRRAAFCCSRKRTFSMKLAKRSLSSCSSCFSLLRVARNSWLRASAMEKSRRSEGRRRRAPAPARGLRKLPRRTEELGDAEPSRRLLEKRELDE

SEQ ID NO: 3291 - protein, 328 aa, Homo sapiens
MSFNQNSASGKHEHLNLTEDFQSSECKESLMDLSHLNKWESIPNTEKSYKCDVCGKIFHQSSALTRHQRIHTREKPYKCKECEKSFSQSSSLSRHKRIHTREKPYKCEASDKSCEASDKSCSPSSGIIQHKKIHTRAKSYKCSSCERVFSRSVHLTQHQKIHKEMPCKCTVCGSDFCHTSYLLEHQRVHHEEKAYEYDEYGLAYIKQQGIHFREKPYTCSECGKDFRLNSHLIQHQRIHTGEKAHECNECGKAFSQTSCLIQHHKMHRKEKSYECNEYEGSFSHSSDLILQQEVLTRQKAFDCDVWEKNSSQRAHLVQHQSIHTKENS

SEQ ID NO: 3292 - protein, 1301 aa, Homo sapiens [sequence omitted]

SEQ ID NO: 3293 - protein, 1243 aa, Homo sapiens
MENCSAASTFLTDSLELELGTEWCKPPYFSCAVDNRGGGKHFSGESYLCSGALKRLILNLDPLPTNFEEDTLEIFGIQWVTETALVNSSRELFHLFRQQLYNLETLLQSSCDFGKVSTLHCKADNIRQQCVLFLHYVKVFIFRYLKVQNAESHVPVHPYEALEAQLPSVLIDELHGLLLYIGHLSELPSVNIGAFVNQNQIKLFPPSWHLLHLHLDIHWLVLEILYMLGEKLKQVVYGHQFMNLASDNLTNISLFEEHCETLLCDLISLSLNRYDKVRSSESLMSDQCPCLRIKELWVLLIHLLDHRSKWFVSESFWNWLNKLLKTLLEKSSDRRRSSMPVIQSRDPLGFSWWIITHVASFYKFDRHGVPDEMRKVESNWNFVEELLKKSISVQGVILEEQLRMYLHCCLTLCDFWEPNIAIVTILWEYYSKNLNSSFSISWLPFKGLANTMKSPLSMLEMVKTCCCDKQDQELYKSSSSYTIFLCILAKVVKKAMKSNGPHPWKQVKGRIYSKFHQKRMEELTEVGLQNFFSLFLLLAAVAEVEDVASHVLDLLNFLKPAFVMSQRALIWKGHMAFLLMYAQKNLDIGVLAEKFSCAFREKAKEFLVSKNEEMVQRQTIWTLLSIYIDGVQEVFETSYCLYPSHEKLLNDGFSMLLRACRESELRTVLSFLQAVLARIRSMHQQLCQELQRDNVDLFVQSSLSAKERHLAAVASALWRHFFSFLKSQRMSQVVPFSQLADAAADFTLLAMDMPSTAPSDFQPQPVISIIQLFGWDDIICPQVVARYLSHVLQNSTLCEALSHSGYVSFQALTVRSWIRCVLQMYIKNLSGPDDLLIDKNLEEAVEKEYMKQLVKLTRLLFNLSEVKSIFSKAQAEYLSISEDPKKALVRFFEAVGVTYGNVQTLSDKSAMVTKSLEYLGEVLKYIKPYLGKKVFSAGLQLTYGMMGILVKSWAQIFATSKAQKLLFRIIDCLLLPHAVLQQEKELPAPMLSAIQKSLPLYLQGMCIVCCQSQNPNAYLNQLLGNVIEQYIGRFLPASPYVSDLGQHPVLLALRNTATIPPISSLKKCIVQVIRKSYLEYKGSSPPPRLASILAFILQLFKETNTDIYEVELLLPGILKCLVLVSEPQVKRLATENLQYMVKACQVGSEEEPSSQLTSVFRQFIQDYGMRYYYQVYSILETVATLDQQVVIHLISTLTQSLKDSEQKWGLGRNIAQREAYSKLLSHLGQMGQDEMQRLENDNT

SEQ ID NO: 3294 - protein, 126 aa, Homo sapiens [sequence omitted]

SEQ ID NO: 3295 - protein, 357 aa, Homo sapiens
MEADSPAGPGAPEPLAEGAAAEFSSLLRRIKGKLFTWNILKTIALGQMLSLCICGTAITSQYLAERYKVNTPMLQSFINYCLLFLIYTVMLAFRSGSDNLLVILKRKWWKYILLGLADVEANYVIVRAYQYTTLTSVQLLDCFGIPVLMALSWFILHARYRVIHFIAVAVCLLGVGTMVGADILAGREDNSGSDVLIGDILVLLGASLYAISNVCEEYIVKKLSRQEFLGMVGLFGTIISGIQLLIVEYKDIASIHWDWKIALLFVAFALCMFCLYSFMPLVIKVTSATSVNLGILTADLYSLFVGLFLFGYKDSTSCPSLSSWWGLSCTAPPLLARPSRLKAACLQSPALGLTTWG

SEQ ID NO: 3296 - protein, 587 aa, Homo sapiens
MQLLYTKDKSYWEDYRQFCKTTAKPVKSLTQLLLDDDCPTAIFPSKPFLQRCFPDFSTKNGTLTIGSKMMFQDGNGGTRSVVELGIAANGINKLLDAKSLGLKVFEDYARTWYWILIGLTIAMVLSWIFLILLRFIAGCLFWVFMIGVIGIIGYGIWHCYQQYTNLQERPSSVLTIYDIGIQTNISMYFELQQTWFTFMIILCIIEVIVILMLIFLRNRIRVAIILLKEGSKAIGYVPSTLVYPALTFILLSICICYWVVTAVFLATSGVPVYKVIAPGGHCIHENQTCDPENFNTTEIAKACPGALCNFAFYGGKSLYHQYIPTFHVYNLFVFLWLINFVIALGQCALAGAFATYYWAMKKPDDIPRYPLFTAFGRAIRYHTGSLAFGSLIIALIQMFKIVLEYLDHRLKRTQNTLSKFLQCCLRCCFWCLENAIKFLNRNAYIMIAIYGRNFCRSAKDAFNLLMRNVLKVAVTDEVTYFVLFLGKLLVAGSIGVLAFLFFTQRLPVIAQGPASLNYYWVPLLTVIFGSYLIAHGFFSVYAMCVETIFICFLEDLERNDGSTARPYYVSQPLLKIFQEENPQTRKQ

SEQ ID NO: 3297 - protein, 1022 aa, Homo sapiens
MLPQVLGCELLKGLNVLDLGLNMEILEEQMLHEILCREYPELETRWQDLKIRALDTCKAVEAAEERLLTMLLFQNPKRQKPAKFLRNIVRAQGKLCQLHAHCEELEGQKLQEMVLWAPYRPVVWHGMAMVKALSQLQNLLPLFCMSPENWLAVTKQALDSMKPREINHGEDLASHLLQLRAHLTRQLLGSTVTALGLTQVPLVGALGALALLQATGKASELERLALWPGLAASPSTVHSKPVSDVARPAWLGPKAWHECEMLELLPPFVGLCASLAGHSSAWQAYLSLSSTVLGPAPGPGPEPLSLLQKLILWRVLRPECLAGALADFTTSLLGRPLDENTYAPTMPFKHSQATQPMLILLPPPGHPSATLHPLTVIQKLAAKYQQGQKQLQVIALGSEAWDPVSVVVSTLSQAMYEGHWLVLDNCHLMPHWPKELLQLLLELLGRAKVVADLESEQLLDQPESRNVSTVHRDFRLWLIVPAESSASLPAVLTQHSMPVFWNQSLELGHVLIDSVELAQQVLYMQPPTQALPLLLLHGLLLHRQLYGTRLQAHRGRWSQVTLTQVLQTQDQLWASLSNPRAAMQELAASVFYGGPLGDTEDREALISLTQACLSPSSGSWVQPHTPQSLLATLMPLPELRELDAMAECKAQMHLLPSPPEPRLCGLSEGPQAWLLRRQSRALLSALQRSSPVWVPESRRGAQLAERRLRQRLVQVNRRLESLQDLLTHVIRQDESDAPWSVLGPNARRPLEGVLETEALELSQLVGTLQRDLDCLLQQLKGAPPCPSRRCAAVAHALWTGRLPLPWRPHAPAGPQPPWHWLRQLSRRGQLLVRYLGVGADASSDVPERVFHLSAFRHPRRLLLALRGEAALDQNVPSSNFPGSRGSVSSQLQYKRLEMNSNPLHFRVENGPNPTVPERGLLLIGLQVLHAEWDPIAGALQDSPSSQPSPLPPVSISTQAPGTSDLPAPADLTVYSCPVYMGGPLGTAKLQSRNIVMHLPLPTKLTPNTCVQRRVHVCSPPLS

SEQ ID NO: 3298 - protein, 821 aa, Homo sapiens
MQAQCTLINFLVTRDGLEDQLLAAVVAKERPDLEQLEANLTKSQNEFKIVLKELEDSLLARLSAASGNFLGDTALVENLETTKHTASEIEEKVVEAKITEVKINEARENYRPAAERASLLYFILNDLNKINPVYQFSLKAFNVVFEKAIQRTTPANEVKQRVINLTDEITYSVYMYTARGLFERDKLIFLAQVTFQVLSMKKELNPVELDFLLRFPFKAGVVSPVDFLQHQGWGGIKALSEMDEFKNLDSDIEGSAKRWKKLVESEAPEKEIFPKEWKNKTALQKLCMVRCLRPDRMTYAIKNFVEEKMGSKFVEGRSVEFSKSYEESSPSTSIFFILSPGVDPLKDVEALGKKLGFTIDNGKLHNVSLGQGQEVVAENALDVAAEKGHWVILQNIHLVARWLGTLDKKLERYSTGSHEDYRVFISAEPAPSPETHIIPQGILENAIKITNEPPTGMHANLHKALDLFTQDTLEMCTKEMEFKCMLFALCYFHAVVAERRKFGAQGWNRSYPFNNGDLTISINVLYNYLEANPKVPWDDLRYLFGEIMYGGHITDDWDRRLCRTYLAEYIRTEMLEGDVLLAPGFQIPPNLDYKGYHEYIDENLPPESPYLYGLHPNAEIGFLTVTSEKLFRTVLEMQPKETDSGAGTGVSREEKVKAVLDDILEKIPETLNMAEIMAKAAEKTPYVVVAFQECERMNILTNEMRRSLKELNLGLKGELTITTDVEDLSTALFYDTVPDTWVARAYPSMMGLAAWYADLLLRIRRLVCPCRNSRPGRQTLPCPPPCGWPASSTPSRSSRPSCSPWPGRTSGPWTRCVCLSR

SEQ ID NO: 3299 - protein, 652 aa, Homo sapiens
MRRPCLQGTYCDQHTNLCYSSGWPSAFGTSPATSFPLAHQSPGTSPVTSPQLTHVPLETGPMISPPPTHRTPGTCLTISPPLARRPVETSPMASPTLSHRVLETGLMISLPSHWFSGRSYNDPLLSPASSPPTGSFYHGSLKPLDSCEPKPQLDLPLEKNCCGFPLSSQAGMPGSPSSPQEGSYHYSHLSSEAYIPTPGSPCYAICLCPGSTDSPCSPQSQAPRKACIESLLSWEATGNSYLILTPDTTTSGPPCSQEPSRPHGPHSVLSFPSPLGNQFISPPQSLPRRSYNEPPLPTPVSPQPKSPKSPELRQSHTPHKCLSLVNTPQHTPSGQPKPAKAHTCPPPPSCLSGPSCMQPYITTPSNSSPKELPPGTTLLTVVPRALKSVIPTSFPLCLPCDPVSANSYAQSSRHGPSIGPPCNTHICSVVPSTPHPCPLSGSLNHSTGPPPIVPLCDTYSTPRGPPQPRCQPVMPPCSTHIYSFIPLRTPFDPQSLPIVPRVRAYPDTVPCGLHIYPVASQGPCKEPLQIPYSCPLPSSKDSSCSTNPSCSSTIISKCQSSDSESRSSHQSQSRSQSKSPHDGRSQSWSKRHHLSRSPSQKSSPYPSRSWGRSSNPQQNTSQGQSESPQLSINEHQGESPQISRGQGKSKSL

SEQ ID NO: 3300 - protein, 495 aa, Homo sapiens
MAKRPGPPGSREMGLLTFRDIAIEFSLAEWQCLDHAQQNLYRDVMLENYRNLVSLGIAVSKPDLITCLEQNKEPQNIKRNEMVAKHPVTCSHFTQDLQSEQGIKDSLQKVILRRYGKCGQEDLQVKKCCKSVGECEVHKGGYNYVNQCLSATQNKTFQTHKCVKVFGKFSNSNRHKTRHTGKKHFKCKNDGKSFCMLSRLNQHQIIHTREKSYKCEECGKSFNCSSTLTRHKRIHTGEKPYRCEECGKAFSWSASLTKHKRIHTGEKPYTCEERGKVFSRSTLTNYKRIHTGEKPYTCEECGKAFSRSSTLTNHKRIHTGERPYKCEECGKAFSLSSTLKKHKIVHTGEKLYTCEECGKAFTFSSTLNTHKRIHTGEKPYTCEECGKAFSLPSTFTYHKRTHTGEKPYKCEECGKAFNCSSTLKKHKIIHTGEKLYKCKECGKAFTFSSTLNTHKRIHTGEKPYKCEECDQTFKWHSSLANHKNMHTGEKPYKYE

SEQ ID NO: 3301 - protein, 513 aa, Homo sapiens
MSSKPEPKDVHQLNGTGPSASPCSSDGPGREPLAGTSEFLGPDGAGVEVVIESRANAKGVREEDALLENGSQSNESDDVSTDRGPAPPSPLKETSFSIGLQVLFPFLLAGFGTVAAGMVLDIVQHWEVFQKVTEVFILVPALLGLKGNLEMTLASRLSTAANIGHMDTPKELWRMITGNMALIQVQATVVGFLASIAAVVFGWIPDGHFSIPHAFLLCASSVATAFIASLVLGMIMIGVIIGSRKIGINPDNVATPIAASLGDLITLALLSGISWGLYLELNHWRYIYPLVCAFFVALLPVWVVLARRSPATREVLYSGWEPVIIAMAISSVGGLILDKTVSDPNFAGMAVFTPVINGVGGNLVAVQASRISTFLHMNGMPGENSEQAPRRCPSPCTTFFSPDVNSRSARVLFLLVVPGHLVFLYTISCMQGGHTTLTLIFIIFYMTAALLQVLILLYIADWMVHWMWGRGLDPDNFSIPYLTALGDLLGTGLLALSFHVLWLIGDRDTDVGD

SEQ ID NO: 3302 - protein, 663 aa, Homo sapiens [sequence omitted]

SEQ ID NO: 3303 - protein, 1446 aa, Homo sapiens
MTRPQELPELPKTTALELQESSVASAMELPGPPATSMPELQGPPVTPVLELPGPSATPVPELPGPLSTPVPELPGPPATAVPELPGPSVTPVPQLSQELPGLPAPSMGLEPPQEVPEPPVMAQELPGLPLVTAAVELPEQPAVTVAMELTEQPVTTTELEQPVGMTTVEHPGHPEVTTATGLLGQPEATMVLELPGQPVATTALELPGQPSVTGVPELPGLPSATRALELSGQPVATGALELPGPLMAAGALEFSGQSGAAGALELLGQPLATGVLELPGQPGAPELPGQPVATVALEISVQSVVTTSELSTMTVSQSLEVPSTTALESYNTVAQELPTTLVGETSVTVGVDPLMAPESHILASNTMETHILASNTMDSQMLASNTMDSQMLASNTMDSQMLASSTMDSQMLATSSMDSQMLATSSMDSQMLATSTMDSQMLATSSMDSQMLATSSMDSQMLATSSMDSQMLATSSMDSQMLATSTMDSQMLATSTMDSQMLATSSMDSQMLASGTMDSQMLASGTMDAQMLASGTMDAQMLASSTQDSAMLGSKSPDPYRLAQDPYRLAQDPYRLGHDPYRLGHDAYRLGQDPYRLGHDPYRLTPDPYRMSPRPYRIAPRSYRIAPRPYRLAPRPLMLASRRSMMMSYAAERSMMSSYERSMMSYERSMMSPMAERSMMSAYERSMMSAYERSMMSPMAERSMMSAYERSMMSAYERSMMSPMADRSIMSMGADRSMMSSYSAADRSMMSSYSAADRSMMSSYTADRSMMSMAADSYTDSYTDTYTEAYMVPPLPPEEPPTMPPLPPEEPPMTPPLPPEEPPEGPALPTEQSALTAENTWPTEVPSLPSEESVSQPEPPVSQSEISEPSAVPTDYSVSASDPSVLVSEAAVTVPEPPPEPESSITLTPVESAVVAEEHEVVPERPVTCMVSETPAMSAEPTVLASEPPVMSETAETFDSMRASGHVASEVSTSLLVPAVTTPVLAESILEPPAMAAPESSAMAVLESSAVTVLESSTVTVLESSTVTVLEPSVVTVPEPPVVAEPDYVTIPVPVVSALEPSVPVLEPAVSVLQPSMIVSEPSVSVQESTVTVSEPAVTVSEQTQVIPTEVAIESTPMILESSIMSSHVMKGINLSSGDQNLAPEIGMQEIALHSGEEPHAEEHLKGDFYESEHGINIDLNINNHLIAKEMEHNTVCAAGTSPVGEIGEEKILPTSETKQCTVLDTYPGVSEADAGETLSSTGPFALEPDATGTSKGIEFTTASTLSLVNKYDVDLSLTTQDTEHDMVISTSPSGGSEADIEGPLPAKDIHLDLPSNNNLVSKDTEEPLPVKESDQTLAALLSPKESSGGEKEVPPPPKETLPDSGFSANIEDINEADLVRPLLPKDMERLTSLRAGIEGPLLASDVGRDRSAASPVVSSMPERASESSSEEKDDYEIFVKVKDTH

SEQ ID NO: 3304 - protein, 142 aa, Homo sapiens
MEFCSVAWAGVQCAISAHGNFRLLGSSDSPACLPSSWDYRCTPPHLANFVFLVETGFHHVGQAGLELLTSGDPPTSASQSAGIIGMSHRAWPIPTLLRATQSKATGSKYFLKGPENKSVGSQAMGCLWRPPNSALEVAPQLP

SEQ ID NO: 3305 - protein, 144 aa, Homo sapiens [sequence omitted]

SEQ ID NO: 3306 - protein, 140 aa, Homo sapiens [sequence omitted]

SEQ ID NO: 3307 - protein, 576 aa, Homo sapiens [sequence omitted]

SEQ ID NO: 3308 - protein, 845 aa, Homo sapiens
MEKNINLRNCQTLNTYVMLTHLRMPAPIRLRELIRTIRTARTQAEEREMIQKECAAIRSSFREEDNTYRCRNVAKLLYMHMLGYPAHFGQLECLKLIASQKFTDKRIGYLGAMLLLDERQDVHLLMTNCIKNDLNHSTQFVQGLALCTLGCMGSSEMCRDLAGEVEKLLKTSNSYLRKKAALCAVHVIRKVPELMEMFLPATKNLLNEKNHGVLHTSVVLLTEMCERSPDMLAHFRKLVPQLVRILKNLIMSGYSPEHDVSGISDPFLQVRILRLLRILGRNDDDSSEAMNDILAQVATNTETSKNVGNAILYETVLTIMDIKSESGLRVLAINILGRFLLNNDKNIRYVALTSLLKTVQTDHNAVQRHRSTIVDCLKDLDVSIKRRAMELSFALVNGNNIRGMMKELLYFLDSCEPEFKADCASGIFLAAEKYAPSKRWHIDTIMRVLTTAGSYVRDDAVPNLIQLITNSVEMHAYTVQRLYKAILGDYSQQPLVQVAAWCIGEYGDLLVSGQCEEEEPIQVTEDEVLDILESVLISNMSTSVTRGYALTAIMKLSTRFTCTVNRIKKVVSIYGSSIDVELQQRAVEYNALFKKYDHMRSALLERMPVMEKVTTNGPTEIVQTNGETEPAPLETKPPPSGPQPTSQANDLLDLLGGNDITPVIPTAPTSKPSSAGGELLDLLGDINLTGAPAAAPAPASVPQISQPPFLLDGLSSQPLFNDIAAGIPSITAYSKNGLKIEFTFERSNTNPSVTVITIQASNSTELDMTDFVFQAAVPKTFQLQLLSPSSSIVPAFNTGTITQVIKVLNPQKQQLRMRIKLTYNHKGSAMQDLAEVNNFPPQSWQ

SEQ ID NO: 3309 - protein, 101 aa, Homo sapiens
MGVGGREAEKRALRTSSQCFCGKWRQDGSSQRGMEAESVCWSLEARMLPNTAVPLRASPPGRLSPLPACCPHRLRGSGGAGPRPFCACLLGRSRPERGSAV

SEQ ID NO: 3310 - protein, 236 aa, Homo sapiens [sequence omitted]

SEQ ID NO: 3311 - protein, 225 aa, Homo sapiens [sequence omitted]

SEQ ID NO: 3312 - protein, 1177 aa, Homo sapiens [sequence omitted]

SEQ ID NO: 3313 - protein, 359 aa, Homo sapiens [sequence omitted]

SEQ ID NO: 3314 - protein, 820 aa, Homo sapiens
MNPYVPDKLITAGIKHMKFWRKAGDVCIWRDIFLVKTVKAHDGPVFSMHALEKGFVTGGKDGIVALWDDSFERCLKTYAIKRAALAPGSKGLLLEDNPSIRAISLGHGHILVGTKNGEILEVDKSGPITLLVQGHMEGEVWGLATHPYLPICATVSDDKTLRIWDLSPSHCMLAVRKLKKGGRCCCFSPDGKALAVGLNDGSFLMANADTLEDLVSFHHRKDMISDIRFSPGSGKYLAVASHDSFIDIYNVMSSKRVGICKGATSYITHIDWDIRGKLLQVNTGAKEQLFFEAPRGKKQTIPSVEVEKIAWASWTSVLGLCCEGIWPVIGEVTDVTASCLTSDKMVLATGDDLGFVKLFRYPTKGKFGKFKRYVAHSTHVTNVRWTYDDSMLVTLGGTDMSLMVWTNEMEGYREKRPCDSEESDIDSEEDGGYDSDVTRENEISYTIRALSTNIRPMLGIKPHLQQKEPSIDERPPVSRAPPQPEKLQTNNVGKKKRPIEDLVLELIFGYRGRDCRNNVHYLNDGDDIIYHTASVGILHNVATGSQSFYQEHNDDILCLTVNQHPKFINIVATGQVGDSADMSATAPSIHIWDAMNKQTLSILRCYHSKGVCSVSFSATGKLLLSVGLDPEHTITIWRWQEGAKIASRAGHNQRIFVAEFRPDSDTQFVSVGVKHVKFWTLAGRALLSKKGLLSTLEDARMQTMLAIAFGANNLTFTGTISGDVCVWKDHILCRIVARAHNGPVFAMYTTLRDGLIVTGGKERPSKEGGAVKLWDQELRRCRAFRLETGQATDCVRSVCRGKVFTREDFESFHHKEMINV

SEQ ID NO: 3315 - protein, 139 aa, Homo sapiens
MCSGSCCGQCSLVSEALFVLVWPRTSQKTVLSCGGRHGRSRSLPPALEWAGLLVLCSGRTLPDFQVFPGVRHPIAAFSLVTLTSFLLRLVLDLQGHLPRLPWKGALSSFLYFDDFERFPIVTVRKLASEAKILLLSWPL

SEQ ID NO: 3316 - protein, 358 aa, Homo sapiens
MFRSPGTLEILTPLRDTAFPAFDFQKCLVNIQALLMDPELHVGKCKIEFLTGEFIYRMYTIDMHSQLELTASLIPQPGTSLIPLVMVSNPHSLGFQATFYENGYTSDGNTKYKLDIFLKQQQHWGRTDSNFTSSLKKATMSTLTVDIANKEISCVDIKPLSTLISVGCDLDKKIVIQNKVSACSMGILDPLTLQDNYSFIIEKEFYDPGFQGQQSSEDLHVFYSYQQLGCPLLVYYDTLWKPVVELLECSGMNTVHCSLNLPGSSGPPASASQVAGTAVAYHNARLIFFFFFFFFLRQSLALSPRLECSGVILAHRKLRLPGSRHSPASASRVAGITGARHCARLIFFIFSRDRVSPC

SEQ ID NO: 3317 - protein, 262 aa, Homo sapiens
MGSRPCSPSACLAPWWGQQPGGPGPAKRSRLEEPAGPESRAAPSPEDPAGTPAVDALTSMVVLDAGCALRVPLEDVDLVLELAPMSVLRVSLGGHTLIVIPEVLLSSVDECSGAQGDWSAGLEVDVFLGAHGEDVVVEQEVCASVPEIAAEEEAYEEDADSEFPELWMDSAAGSAAGLYPSARSMFSPYREGPIRGPCALAPNPSSERRSPRPIFDLEFHLLEPVPSSPLQPLPPSPSPGPHARPELPERPPCKVRRRLFQE

SEQ ID NO: 3318 - protein, 165 aa, Homo sapiens
MYSGEFGLVRVYATFYLSDLKQIKIDLGKFSDNPDGCIDVLQGLGQSFDLTWRDIMLLLDQTLTPNERSTVITAAREFGDLWYLSQVNDRMTTEEREQFPTGQQAVPRLDPHWDAESEHGDWCHRHLLTCVLEGLRKTRQKPINYSMMSTITQGKKKILLPFWRD

SEQ ID NO: 3319 - protein, 142 aa, Homo sapiens
MFSMVLADTVQVGEGQAGAFRQLTWAALPFQVIVQSGRHPTVLQKLCQLPFQYFSDPRLIKVLFPSLIAACDNNHQNKIILEQEMSCVLLATFIQDLAQTPGQAENQPYQPKGMSLLKLNFMCLLAKWTSFLSFPLELLHYM

SEQ ID NO: 3320 - protein, 108 aa, Homo sapiens
MCRGRDGALARRWEAGGSAGAPGEDGTPPPLLLRTGKAFGPELGAQNGSVRCLSHPDPAPGFFRSRRWIGCITRLPPATLPAQSLQKPPLSPSPGPYPLSQPHFFPPP

SEQ ID NO: 3321 - protein, 208 aa, Homo sapiens
MSPTKDSHPSPHFPRDSGIHAPTPPDSGALTLSPPVSQGPGVGPRTGRGNRLCRPPGRSAARSFCLLPGPPLGTGALGSPRAAQGLGFRGSGQRARHNSFTSPSPPGAHHPLGTHTRALPPPLARCPCAALLAGRECHGGPSPAAPRPLPGTSLTWPSRAPLPRPPPRERQGPGDRSPSPSAPSCPGVGASSPRRRKPREAAGLTPDG

SEQ ID NO: 3322 - protein, 119 aa, Homo sapiens
MYKFLDTYTLPSLKQEEIEFLKRPITSSEIEAVINSLPTKSPGPDGFTAKSYQRYKEELVLFLLKPFQRIEKEGILPNSFYESSVILIPKPHRDTTKENFRPISLMNINAKILNKILAN

SEQ ID NO: 3323 - protein, 881 aa, Homo sapiens
MERRGKYSSKLERESKRTSENEAIKRCCSPPNELGFRRGSSYSKHDSSASRYKSTLSKPIPKSDKFKNSFCCTELNEEIKQSHSFSLQTPCSKGSELRMINKNPEREKAGSPAPSNRLNDSPTLKKLDELPIFKSEFITHDSHDSIKELDSLSKVKNDQLRSFCPIELNINGSPGAESDLATFCTSKTDAVLMTSDDSVTGSELSPLVKACMLSSNGFQNISRCKEKDLDDTCMLHKKSESPFRETEPLVSPHQDKLMSMPVMTVDYSKTVVKEPVDTRVSCCKTKDSDIYCTLNDSNPSLCNSEAENIEPSVMKISSNSFMNVHLESKPVICDSRNLTDHSKFACEEYKQSIGSTSSASVNHFDDLYQPIGSSGIASSLQSLPPGIKVDSLTLLKCGENTSPVLDAVLKSKKSSEFLKHAGKETIVEVGSDLPDSGKGFASRENRRNNGLSGKCLQEAQEEGNSILPERRGRPEISLDERGEGGHVHTSDDSEVVFSSCDLNLTMEDSDGVTYALKCDSSGHAPEIVSTVHEDYSGSSESSNDESDSEDTDSDDSSIPRNRLQSVVVVPKNSTLPMEETSPCSSRSSQSYRHYSDHWEDERLESRRHLYEEKFESIASKACPQTDKFFLHKGTEKNPEISFTQSSRKQIDNRLPELSHPQSDGVDSTSHTDVKSDPLGHPNSEETVKAKIPSRQQEELPIYSSDFEDVPNKSWQQTTFQNRPDSRLGKTELSFSSSCEIPHVDGLHSSEELRNLGWDFSQEKPSTTYQQPDSSYGACGGHKYQQNAEQYGGTRDYWQGNGYWDPRSGRPPGTGVVYDRTQGQVPDSLTDDREEEENWDQQDGSHFSDQSDKFLLSLQKDKGSVQAPEISSNSIKDTLAVN

SEQ ID NO: 3324 - protein, 1018 aa, Homo sapiens
MCICGTAHSVLDEGPVRCRAGPRDLLEARRPRAHECLGEALRVMHQIISKYPLLNTVETLTAAGTLIAKVKAFHYESNNDLEKQEFEKALETIAVAFSSTVSEFLMGEVDSSTLLAVPPGDSSQSMESLYGPGSEGTPPSLDDCDAGCLPAEEVDVLLQRCEGGVDAALLYAKNMAKYMKDLISYLEKRTTLEMEFAKGLQKIAHNCRQSVMQEPHMPLLSIYSLALEQDLEFGHSMVQAVGTLQTQTFMQPLTLRRLEHEKRRKEIKEAWHRAQRKLQEAESNLRKAKQGYVQRCEDHDKARFLVAKAEEEQAGSAPGAGGTATKTLDKRRRLEEEAKNKAEEAMATYRTCVADAKTQQELEDTKVTALRQIQEVIRQSDQTIKSATISYYQMMHMQTAPLPVHFQMLCESSKLYDPGQQYASHVRQLQRDQEPDVHYDFEPHVSANAWSPVMRARKSSFNVSDVARPEAAGSPPEEGGCTEGTPAKDHRAGRGHQVHKSWPLSISDSDSGLDPGPGAGDFKKFERTSSSGTMSSTEELVDPDGGAGASAFEQADLNGMTPELPVAVPSGPFRHEGLSKAARTHRLRKLRTPAKCRECNSYVYFQGAECEECCLACHKKCLETLAIQCGHKKLQGRLQLFGQDFSHAARSAPDGVPFIVKKCVCEIERRALRTKGIYRVNGVKTRVEKLCQAFENGKELVELSQASPHDISNVLKLYLRQLPEPLISFRLYHELVGLAKDSLKAEAEAKAASRGRQDGSESEAVAVALAGRLRELLRDLPPENRASLQYLLRHLRRIVEVEQDNKMTPGNLGIVFGPTLLRPRPTEATVSLSSLVDYPHQARVIETLIVHYGLVFEEEPEETPGGQDESSNQRAEVVVQVPYLEAGEAVVYPLQEAAADGCRESRVVSNDSDSDLEEASELLSSSEASALGHLSFLEQQQSEASLEVASGSHSGSEEQLEATAREDGDGDEDGPAQQLSGFNTNQSNNVLQAPLPPMRLRGGRMTLGSCRERQPEFV

SEQ ID NO: 3325 - protein, 1185 aa, Homo sapiens
MCNLQKLNLAGNEIEHIPVWLGKKLKSLRVLNLKGNKISSLQDISKLKLLQDLISLILVENPVVTLPHYLQFTIFHLRSLESLEGQPVTTQDRQEAFERFSLEEVERLERDLEKKMIETEELKSKQTRFLEEIKNQDKLNKSLKEEAMLQKQSCEELKSDLNTKNELLKQKTIELTRACQKQYELEQELAFYKIDAKFEPLNYYPSEYAEIDKAPDESPYIGKSRYKRNMFATESYIIDSAQAVQIKKMEPDEQLRNDHMNLRGHTPLDTQLEDKEKKISAAQTRLSELHDEIEKAEQQILRATEEFKQLEEAIQLKKISEAGKDLLYKQLSGRLQLVNKLRQEALDLELQMEKQKQEIAGKQKEIKDLQIAIDSLDSKDPKHSHMKAQKSGKEQQLDIMNKQYQQLESRLDEILSRIAKETEEIKDLEEQLTEGQIAANEALKKDLEGVISGLQEYLGTIKGQATQAQNECRKLRDEKETLLQRLTEVEQERDQLEIVAMDAENMRKELAELESALQEQHEVNASLQQTQGDLSAYEAELEARLNLRDAEANQLKEELEKVTRLTQLEQSALQAELEKERQALKNALGKAQFSEEKEQENSELHAKLKHLQDDNNLLKQQLKDFQNHLNHVVDGLVRPEEVAARVDELRRKLKLGTGEMNIHSPSDVLGKSLADLQKQFSEILARSKWERDEAQVRERKLQEEMALQQEKLATGQEEFRQACERALEARMNFDKRQHEARIQQMENEIHYLQENLKSMEEIQGLTDLQLQEADEEKERILAQLRELEKKKKLEDAKSQEQVFGLDKELKKLKKAVATSDKLATAELTIAKDQLKSLHGTVMKINQERAEELQEAERFSRKAAQAARDLTRAEAEIELLQNLLRQKGEQFRLEMEKTGVGTGANSQVLEIEKLNETMERQRTEIARLQNVLDLTGSDNKGGFENVLEEIAELRREVSYQNDYISSMADPFKRRGYWYFMPPPPSSKVSSHSSQATKDSGVGLKYSASTPVRKPRPGQQDGKEGSQPPPASGYWVYSPIRSGLHKLFPSRDADSGGDSQEESELDDQEEPPFVPPPGYMMYTVLPDGSPVPQGMALYAPPPPLPNNSRPLTPGTVVYGPPPAGAPMVYGPPPPNFSIPFIPMGVLHCNVPEHHNLENEVSRLEDIMQHLKSKKREERWMRASKRQS

SEQ ID NO: 3326 - protein, 299 aa, Homo sapiens
MPEGSVSAMRTSPKSSWPWCCSWSCAWSSSSPPWRSPPSATGTLCRSCSLAPSGDLEVLKSQETGCRDPLQLPGLLGPCALSPMVGSPSGRVKLVGRRSVVQCSRCCIDPLIFFVFVFILFCFVFEMESCSVTQAGVQWCDDLGSLQPPPPGFSCLSLPGSWDYRHPPPHPANFCIFSRDEVSTPTQAGVKLLTASDLPTLASQSVAITGVSHHAQPNPLIFCFSSSTVRKAFDRGPRRWQHGGGLTVWVVVKALESQLQREDVDLRDGQCHLHRRLEAPAWGNLLGKEGSKRGTMKQN

SEQ ID NO: 3327 - protein, 131 aa, Homo sapiens
MEDFNTPPTAVSRLVRQIIRQKTNNETVDSNWALDQTDLIDIYRILHPETTECTFFSFAHGTFSKIDHMLSHKISLNKFLKITTILSVFSDHCGIKLEVNIKNSQNHRGTWKLNNLLLKDFCVNNRIKAEI

SEQ ID NO: 3328 - protein, 258 aa, Homo sapiens
MLSKLEKSDSHQFRVMAAVLRHCLLIVGPTEDKTEELHSNAVNLLSNVPVSCLDVLICPLTHEETAQEATTLDELPSNKTAEKETVLKNNTMVYNGMNMEAIHVLLNFMEKRIDKGSSYREGLTPVLSLLTECSRAHRNIRKFLKDQVLPPLRDVTNRPEVGSTVRNKLVRLMTHVDLGVKQIAAEFLFVLCKERVDSLLKYTGYGNAAGLLAARGLLAGGRGDNWYSEDEDTDTEEYKNAKPNSIEFEERSHLSRGK

SEQ ID NO: 3329 - protein, 144 aa, Homo sapiens
MAPPWVCSSTTLELEQDLSSPSCQLPDPRTTTTLLHPGSVAPRPSDRIKTSPPWVASFRTLKLQQNCSSLGRQLHDPHNRTRPLLPGSPASGPLNYNKIAPPWVGSSTTLKLQQDFSSPSCQLPDPRITTTLPLPGSAAPRPSD

SEQ ID NO: 3330 - protein, 1124 aa, Homo sapiens [sequence omitted]

SEQ ID NO: 3331 - protein, 305 aa, Homo sapiens
MDNRNTQMYTEGRTKAPGTQPSPGLRITIKRAGVEPIIPGVSKVMFPDASEVGSKKHLSSASRGPEKGPRLRDAFEKGPSELRIQEQGPPARPGKKQPSWVPQEGSQELQAGQDQSELGLLPSWVPEVPEGLQQLGSGKEIKGQQGRQRNRGIGEDQPPESCQGSGYQSTPSHQADMVQPAEPCCRLASHGQPLGGKHPKEAGVPHIRPQEAPPEPSPGGHGDSSQEAMPPMSVVAPEEKTVNPFLPSTPGPKKAKGGRADNRHEQSQVVGPGVTHSRPWLSRARWNTLVIPALWEAKAEDHLRR

SEQ ID NO: 3332 - protein, 891 aa, Homo sapiens
MTAILNQMGDQHYSFYIETFQTSSELVDFLMETFIMFKDLIGKNVYPGDWMAMSMVQNRVFLRAINKFAETMNQKFLEHTNFEFQLWNNYFHLAVAFITQDSLQLEQFSHAKYNKILNKYGDMRRLIGFSIRDMWYKLGQNKICFIPGMVGPILEMTLIPEAELRKATIPIFFDMMLCEYQRSGDFKKFENEIILKLDHEVEGGRGDEQYMQLLESILMECAAEHPTIAKSVENFVNLVKGLLEKLLDYRGVMTDESKDNRMSCTVNLLNFYKDNNREEMYIRYLYKLRDLHLDCDNYTEAAYTLLLHTWLLKWSDEQCASQVMQTGQQHPQTHRQLKETLYETIIGYFDKGKMWEEAISLCKELAEQYEMEIFDYELLSQNLIQQAKFYESIMKILRPKPDYFAVGYYGQGFPSFLRNKVFIYRGKEYERREDFQMQLMTQFPNAEKMNTTSAPGDDVKNAPGQYIQCFTVQPVLDEHPRFKNKPVPDQIINFYKSNYVQRFHYSRPVRRGTVDPENEFASMWIERTSFVTAYKLPGILRWFEVVHMSQTTISPLENAIETMSTANEKILMMINQYQSDETLPINPLSMLLNGIVDPAVMGGFAKYEKAFFTEEYVRDHPEDQDKLTHLKDLIAWQIPFLGAGIKIHEKRVSDNLRPFHDRMEECFKNLKMKVEKEYGVREMPDFDDRRVGRPRSMLRSYRQMSIISLASMNSDCSTPSKPTSESFDLELASPKTPRVEQEEPISPGSTLPEVKLRRSKKRTKRSSVVFADEKAAAESDLKRLSRKHEFMSDTNLSEHAAIPLKASVLSQMSFASQSMPTIPALALSVAGIPGLDEANTSPRLSQTFLQLSDGDKKTLTRKKVNQFFKTMLASKSAEEGKQIPDSLSTDL

SEQ ID NO: 3333 - protein, 1423 aa, Homo sapiens [sequence omitted]

SEQ ID NO: 3334 - protein, 139 aa, Homo sapiens
MQVLHGHQFSNQWDQSLRIFWDMWHESTEFRAEPPNGFPKGLCPVAFPPGRDKGPRDRTSSRHLVSSVWLGKAPEPLILPPSRRLLNFPPFLMILFIALCLLGSHLGSGPTYPSQAQGLQPGRHSVYCASCSLGLESFW

SEQ ID NO: 3335 - protein, 109 aa, Homo sapiens
MIPHSLIALNTIHLLITTRLGASSLRGAPRVFPDSFPFAPNPHATIQQVLWLLSATSNLIHHLHFHNQFQSSSSPTGLLPKILLLPKILQPPCILSCPPAVQPPLKHPE

SEQ ID NO: 3336 - protein, 110 aa, Homo sapiens
MIFPYLRVQEKECRTQKSLQISEVCTHCNITISASFCLILDICSLLTESKSVNYQIQSNHGSSPVSVVTSKPSSDQKFAQTRFQTEICRASESQRELTTISVASRKQWTS

SEQ ID NO: 3337 - protein, 215 aa, Homo sapiens
MASGRWASPGPAWASRRPLQAQVVLKSASPGPAPASQQASSFGSAPAQLPPAFVDPELSPAMLLSPTCLPVACTGPGLAGEQPLQAPLLPPRGISRPSSGLTAASRDQVPACLPAACVRPSSSVTVACSGPTHASGTLSRGVSPCLTLASLTLREFSVGPCLTLASLTLREVSMSPCLTLVSLTLRAILPHAGLLRPSSCLCWPFQAQPLPVGGL

SEQ ID NO: 3338 - protein, 114 aa, Homo sapiens [sequence omitted]

SEQ ID NO: 3339 - protein, 358 aa, Homo sapiens
MNNLSPAWKSFKVSVNSLCSGDPDRRLKCIVWDWDSNGKHDFIGEFTSTFKEMRGAMEGKQVQWECINPKYKAKKKNYKNSGTVILNLCKIHKMHSFLDYIMGGCQIQFTVAIDFTASNGDPRNSCSLHYIHPYQPNEYLKALVAVGEICQDYDSDKMFPAFGFGARIPPEYTVSHDFAINFNEDNPECAGIQGVVEAYQSCLPKLQLYGPTNIAPIIQKVAKSASEETNTKEASQYFILLILTDGVITDMADTREAIVHASHLPMSVIIVGVGNADFSDMQMLDGDDGILRSPKGEPVLRDIVQFVPFRNFKHASPAALAKSVLAEVPNQVVDYYNGKGIKPKCSSEMYESSRTLAP

SEQ ID NO: 3340 - protein, 108 aa, Homo sapiens [sequence omitted]

SEQ ID NO: 3341 - protein, 119 aa, Homo sapiens
MVGLRWWNHIDEDGKSHWVFESRKESSQENKTVSEAESRIFWLGLIACPVLWVIFAFSALFSFRVKWLAVVIMGVVLQGANLYGYIRCKVRSRKHLTSMATSYFGKQFLRQNTGDDQTS

SEQ ID NO: 3342 - protein, 149 aa, Homo sapiens
METCFRLRYPSCHVALTECVCRLENALRNFACLTTGDVIAINYNEKIYELRVMETKPDKAVSIIECDMNVDFDAPLGYKEPERQVQHEESTEGEADHSGYAGELGFRAFSGSGNRLDGKKKGVEPSPSPIKPGDIKRGIPNYEFKLGSS

SEQ ID NO: 3343 - protein, 806 aa, Homo sapiens [sequence omitted]

SEQ ID NO: 3344 - protein, 101 aa, Homo sapiens [sequence omitted]

SEQ ID NO: 3345 - protein, 600 aa, Homo sapiens
MSHQEGSTGGLPDLVTESLFSSPEEQSGVAAVTAASSDIEMAATEPSTGDGGDTRDGGFLNDASTENQNTDSESSSEDVELESMGEGLFGYPLVGEETEREEEEEEMEEEGEEEEQPRMCPRCGGTNHDQCLLDEDQALEEWISSETSALPRSRWQVLTALRQRQLGSSARFVYEACGARTFVQRFRLQYLLGSHAGSVSTIHFNQRGTRLASSGDDLRVIVWDWVRQKPVLNFESGHDINVIQAKFFPNCGDSTLAMCGHDGQVRVAELINASYCENTKRVAKHRGPAHELALEPDSPYKFLTSGEDAVVFTIDLRQDRPASKVVVTRENDKKVGLYTISMNPANIYQFAVGGHDQFVRIYDQRRIDKKENNGVLKKFTPHHLVYCDFPTNITCVVYSHDGTELLASYNDEDIYLFNSSLSDGAQYVKRYKGHRNNDTIKCVNFYGPRSEFVVSGSDCGHVFFWEKSSSQIIQFMEGDRGDIVNCLEPHPYLPVLATSGLDQHVRIWTPTAKTATELTGLKDVIKKNKQERDEDNLNYTDSFDNRMLRFFVRHLLQRAHQPGWRDHGAEFPDEEELDESSSTSDTSEEEGQDRVQCIPS

SEQ ID NO: 3346 - protein, 680 aa, Homo sapiens [sequence omitted]

SEQ ID NO: 3347 - protein, 154 aa, Homo sapiens
MSVGTSLEQAQMSTLTCPLFIPTVGRKTALHSGEDFQTLLFERVFVNLDGCFDMATGQFAAPLRGIYFFSLNVHSWNYKETYVHIMHNQKEAVILYAQPSERSIMQSQSVMLDLAYGDRVWVRLFKRQRENAIYSNDFDTYITFSGHLIKAEDD

SEQ ID NO: 3348 - protein, 1149 aa, Homo sapiens
MSGYQRLMKEVTEDLKIYVPDTICNRVSKMKENVKQNRKQRESIDKIKVKVANTRKQALQEQFDEWILDPKGMIPKSVIQNVLQEFFQNPDFKLGSHCKQLDITDSTEPRLNKMEFTEYISSHIKDLKSEMFEELLKHLCHSADEFREVIKADMRRQMFAELFLHCDHGKVGFLDRQRTLALLELFYDHSSQMLRSLLQNPRQWPFIEFEEINLTELWGDMDNQKHIYEGFDKVLLEMNTLLSANHASKTQSKLLESPDQPKLNEQRTSTPSPNPPEQQRGVTAEQGPQRISIEEQQQGKKPTAEQELYIESVIEPGTHTESTLEQGSSRRLLTEQETHRESTTEQGQHKGSIEGQGPRRVSVSEQGSSRESVAEQGSRRESIAEQDRHKGSVAEQGSRRMSAAEQGSLRESVIEEPYQKSEQGPYGEIISEEQEDIGSTSQSRKDSILKSTKYGEPITSEYIEVPLQEKRSWEQTYEEEIFLSSELQEEVPTLSRKDHFPETTKKEVQKDKPCEPKSQKIEGKSWSGEFFTCNWKMKYVTFEDEEQANLIYGNSRFTAKLHIQFPKPHPGHEVRLSSKQFQNYIELVVSELRGNEDQVLESVVEFLINALERSHIESLRNSARRKWLHQIQCAAETSGVSLEPVYSETFKALMQDAEAHGNKKISAHISLLEENLLLPEKGNVLLRNVACTLDDAQFVLNRVLYRDMKGISFTVVDEGKPIHVPQVQYHGNIFFWNQSRNKHDYNGSFLALPLQDAYMRIFGVLAVDTLRDPHEINIFLPHEIRFYQGVANVFSTAYHYVHSREHILHIVITGIGWLYDVTSSITSITTYFVEPSPAQDSDYVLRNMMVTGQLGLTEIHKNPPTIHRKSCIFRDFLFKCTDSSEVVLASACGETHIVVPLRERTGEALGVLDFNIGQNRMLLCQEYKDLQKMMKVVQVACYEILGEFSGEIKKKYILEIENVREVQRAGILFFRIMLLELQESIQLLNSMEFVSLLLYDHTLVTEPNSPQDSKSMELEANVKLVRDILKAVILFFHPELEFSSDFGSWDKCKFYVNKYLVNNICAFDPTAKHVEVNVQLIDEYIRDHSRTEVWKFGNVVIEHLYHWIHICSALMKITKQLNSGITPPLPSKTDNYMYAKMPGEGLQEK

SEQ ID NO: 3349 - protein, 1198 aa, Homo sapiens
MPVIPALWEVEMGRSQGQEIETILANRSHSDSTPLPNFLSGSHRPECCTCRLLTASGAQDSLPFGRRLYSGPWRSCEEVCHVSVLSVLSTSCGLSLSLPIFPGWMEWLSPDIALPRRDEWTQTSPARKRITHAKVQGAGQLRLSIDAQDRVLLLHIIEGKGLISKQPGTCDPYVKISLIPEDSRLRHQKTQTVPDCRDPAFHEHFFFPVQEEDDQKRLLVTVWNRASQSRQSGLIGCMSFGVKSLLTPDKEISGWYYLLGEHLGRTKHLKVARRRLRPLRDPLLRMPGGGDTENGKKLKITIPRGKDGFGFTICCDSPVRVQAVDSGGPAERAGLQQLDTVLQLNERPVEHWKCVELAHEIRSCPSEIILLVWRMVPQVKPGPDGGVLRRASCKSTHDLQSPPNKREKNCTHGVQARPEQRHSCHLVCDSSDGLLLGGWERYTEVAKRGGQHTLPALSRATAPTDPNYIILAPLNPGSQLLRPVYQEDTIPEESGSPSKGKSYTGLGKKSRLMKTVQTMKGHGNYQNCPVVRPHATHSSYGTYVTLAPKVLVFPVFVQPLDLCNPARTLLLSEELLLYEGRNKAAEVTLFAYSDLLLFTKEDEPGRCDVLRNPLYLQSVKLQEGSSEDLKFCVLYLAEKAECLFTLEAHSQEQKKRVCWCLSENIAKQQQLAASPPDSKMFETEADEKREMALEEGKGPGAEDSPPSKEPSPGQELPPGQDLPPNKDSPSGQEPAPSQEPLSSKDSATSEGSPPGPDAPPSKDVPPCQEPPPAQDLSPCQDLPAGQEPLPHQDPLLTKDLPAIQESPTRDLPPCQDLPPSQVSLPAKALTEDTMSSGDLLAATGDPPAAPRPAFVIPEVRLDSTYSQKAGAEQGCSGDEEDAEEAEEVEEGEEGEEDEDEDTSDDNYGERSEAKRSSMIETGQGAEGGLSLRVQNSLRRRTHSEGSLLQEPRGPCFASDTTLHCSDGEGAASTWGMPSPSTLKKELGRNGGSMHHLSLFFTGHRKMSGADTVGDDDEASRKRKSKNLAKDMKNKLGIFRRRNESPGAPPAGKADKMMKSFKPTSEEALKWGESLEKLLVHKYGLAVFQAFLRTEFSEENLEFWLACEDFKKVKSQSKMASKAKKIFAEYIAIQACKEVNLDSYTREHTKDNLQSVTRGCFDLAQKRIFGLMEKDSYPRFLRSDLYLDLINQKKMSPPL

SEQ ID NO: 3350 - protein, 222 aa, Homo sapiens [sequence omitted]

SEQ ID NO: 3351 - protein, 467 aa, Homo sapiens [sequence omitted]

SEQ ID NO: 3352 - protein, 291 aa, Homo sapiens
MQAKNKDALQPIKEDRTGKAQDDAFWLQSLITDAFHDKGFQKIKEYFQQKESHFPQKYNRLLLYRLDRSINKELDKNEFQSVSLLLKCIQRFLVDGLKEDEPLLIRQGLIPKLVSWFERTTGILTSEGLASDTSLICVIEDFFDTALIISRSSSEGKIQMLDSFLLSLGFLVTEKTVNHLLQQEGLKTFNCILHAVPREERKKFPLSEGMCHLMKDLARTLLTVGDYDQQVAISEALCRLTIKKSRDELVHKWFDDEVIAEAFKEIKDREFETDSRRFLNHLNNRLGDQRR

SEQ ID NO: 3353 - protein, 110 aa, Homo sapiens [sequence omitted]

SEQ ID NO: 3354 - protein, 945 aa, Homo sapiens
MGARSGARGALLLALLLCWDPRLSQAGTDSGSEVLPDSFPSAPAEPLPYFLQEPQDAYIVKNKPVELRCRAFPATQIYFKCNGEWVSQNDHVTQEGLDEATGLRVREVQIEVSRQQVEELFGLEDYWCQCVAWSSAGTTKSRRAYVRIAYLRKNFDQEPLGKEVPLDHEVLLQCRPPEGVPVAEVEWLKNEDVIDPTQDTNFLLTIDHNLIIRQARLSDTANYTCVAKNIVAKRRSTTATVIVYVNGGWSSWAEWSPCSNRCGRGWQKRTRTCTNPAPLNGGAFCEGQAFQKTACTTICPVDGAWTEWSKWSACSTECAHWRSRECMAPPPQNGGRDCSGTLLDSKNCTDGLCMQNKKTLSDPNSHLLEASGDAALYAGLVVAIFVVVAILMAVGVVVYRRNCRDFDTDITDSSAALTGGFHPVNFKTARPSNPQLLHPSVPPDLTASAGIYRGPVYALQDSTDKIPMTNSPLLDPLPSLKVKVYSSSTTGSGPGLADGADLLGVLPPGTYPSDFARDTHFLHLRSASLGSQQLLGLPRDPGSSVSGTFGCLGGRLSIPGTGVSLLVPNGAIPQGKFYEMYLLINKAESTLPLSEGTQTVLSPSVTCGPTGLLLCRPVILTMPHCAEVSARDWIFQLKTQAHQGHWEEVVTLDEETLNTPCYCQLEPRACHILLDQLGTYVFTGESYSRSAVKRLQLAVFAPALCTSLEYSLRVYCLEDTPVALKEVLELERTLGGYLVEEPKPLMFKDSYHNLRLSLHDLPHAHWRSKLLAKYQEIPFYHIWSGSQKALHCTFTLERHSLASTELTCKICVRQVEGEGQIFQLHTTLAETPAGSLDTLCSAPGSTVTTQLGPYAFKIPLSIRQKICNSLDAPNSRGNDWRMLAQKLSMDRYLNYFATKASPTGVILDLWEALQQDDGDLNSLASALEEMGKSEMLVAVATDGDC

SEQ ID NO: 3355 - protein, 962 aa, Homo sapiens
MDTRPKVSSLLNRMANYTNLTQGAKEHEEAENITEGKKKPTKTMLTAISMSAIATNGVVPAGGSYFMISRALGPEFGGAVGLCFYLGTTFAAAMYILGAIEIFLVYIVPRAAIFHSDDALKESAAMLNNMRVYGTAFLVLMVLVVFIGVRYVNKFASLFLACVIVSILAIYAGAIKSSFAPPHFPVCMLGNRTLSSRHIDVCSKTKEINNMTVPSKLWGFFCNSSQFFNATCDEYFVHNNVTSIQGIPGLASGIITENLWSNYLPKGEIIEKPSAKSSDVLGSLNHEYVLVDITTSFTLLVGIFFPSVTGIMAGSNRSGDLKDAQKSIPIGTILAILTTSFVYLSNVVLFGACIEGVVLRDKFGDAVKGNLVVGTLSWPSPWVIVIGSFFSTCGAGLQSLTGAPRLLQAIAKDNIIPFLRVFGHSKANGEPTWALLLTAAIAELGILIASLDLVAPILSMFFLMCYLFVNLACALQTLLRTPNWRPRFRYYHWALSFMGMSICLALMFISSWYYAIVAMVIAGMIYKYIEYQGAEKEWGDGIRGLSLSAARFALLRLEEGPPHTKNWRPQLLVLLKLDEDLHVKHPRLLTFASQLKAGKGLTIVGSVIVGNFLENYGEALAAEQTIKHLMEAEKVKGFCQLVVAAKLREGISHLIQSCGLGGMKHNTVVMGWPNGWRQSEDARAWKTFIGTVRVTTAAHLALLVAKNISFFPSNVEQFSEGNIDVWWIVHDGGMLMLLPFLLKQHKVWRKCSIRIFTVAQLEDNSIQMKKDLATFLYHLRIEAEVEVVEMHDSDISAYTYERTLMMEQRSQMLRHMRLSKTERDREAQLVKDRNSMLRLTSIGSDEDEETETYQEKVHMTWTKDKYMASRGQKAKSMEGFQDLLNMRPDQSNVRRMHTAVKLNEVIVNKSHEAKLVLLNMPGPPRNPEGDENYMEFLEVLTEGLERVLLVRGGGSEVITIYS

SEQ ID NO: 3356 - protein, 377 aa, Homo sapiens
MLKHNATTHSCSHPHTLTRTMYLITHMLSHTCTHNARAHRLTPTCSHTCLCNAPTRQIAPTPTHLHIHTHICPHTLSLSHTPTQCTSSHSHTCSHTHSLTCPHTLAPTRHTHSHACTHPHVQTHTASAYTFTTHSHTPGHTHSCSHLIHTHSHAHSHPPNAPTHTHAHTLRPTYCPHTRSHPMHLLTLIRPLTPAHTHLTPGSHTHVHTPAHTPHTRSHNHTCLYLLTHACTNTPAYTSYTAHPHTLHCSPSHTHAPAHTHMLTPHHSLTHIHSHMIAPTHTSHTLARTHLLTHISRYSAPHAHTCSHTSHITQLHTRPCSHTCAHTPHTIHSRTHPLTHAHVCSHTCSPIHTHTSSHTSHQVSHTLMLTNSCSHTC

SEQ ID NO: 3357 - protein, 147 aa, Homo sapiens [sequence omitted]

SEQ ID NO: 3358 - protein, 174 aa, Homo sapiens
MGLAGFTKQERRRHRLDKGRWTGQPAVQQPHRTQLPDREHQLTLIPPAPGNATAEESLQDGPDTLLQHGCWEPAQARHFSTGAIENSLRQKGLCQPTEVTSPSADQASGPVALQNSKSHLCRSQPILLPPVFISCPEQVQNRGPSMGEKSLCLQAVFFTVTSHYFCARSHFSGS

SEQ ID NO: 3359 - protein, 635 aa, Homo sapiens [sequence omitted]

SEQ ID NO: 3360 - protein, 309 aa, Homo sapiens
MAVNQSHTENRRGALIPNGESLLKRSPNVELSFPQRSEGSNVFSGRKTGTLFLTSYRVIFITSCSISDPMLSFMMPFDLMTNLTVEQPVFAANFIKGTIQAAPYGGWEGQATFKLVFRNGDAIEFAQLMVKAASAAARGFPLRTLNDWFSSMGIYVITGEGNMCTPQMPCSVIVYGAPPAGYGAPPPGYGAPPAGYGAQPVGNEGPPVGYRASPVRYGAPPLGYGAPPAGYGAPPLGYGAPPLGYGTPPLGYGAPPLGYGAPPAGNEGPPAGYRASPAGSGARPQESTAAQAPENEASLPSASSSQVHS

SEQ ID NO: 3361 - protein, 524 aa, Homo sapiens
MERAGWSANLAWLSGGITLCSGEREARDRGLGRSVNQPKAGALEKLQTSMKNMEKELLCPVCQEMYKQPLVLPCTHNVCQACAREVLGQQGYIGHGGDPSSEPTSPASTPSTRSPRLSRRTLPKPDRLDRLLKSGFGTYPGRKRGALHPQVIMFPCPACQGDVELGERGLAGLFRNLTLERVVERYRQSVSVGGAILCQLCKPPPLEATKGCTECRATFCNECFKLFHPWGTQKAQHEPTLPTLSFRPKGLMCPDHKEEVTHYCKTCQRLVCQLCRVRRTHSGHKITPVLSAYQALKDKLTKSLTYILGNQDTVQTQICELEEAVRHTEVSGQQAKEEVSQLVRGLGAVLEEKRASLLQAIEECQQERLARLSAQIQEHRSLLDGSGLVGYAQEVLKETDQPCFVQAAKQLHNRIARATEALQTFRPAASSSFRHCQLDVGREMKLLTELNFLRGCGHRGLCSGAPQCLRPPSLTPSAPLPMIRSSCAGGCPPIHHLPGTIPLSSGARMCLLSQAPPAGSGGRR

SEQ ID NO: 3362 - protein, 280 aa, Homo sapiens
MTSLTHGMHLTSSTSCSCQSSGTSFTSCSCRSSGTSSTSRSWWSSGTSSTSCSWWSSGTSSTFCSCWSSGTSFTSCSCWSSGTSSTPCSCRSSGTSSTSCSCWSSGTSSTSWSCKSSGTSSTCYMCLSSGTSSTSYSSWSSQTSSTSSMCLPSRTSSIFYSCLPLGHHLPFCSVRPLGPPTTSPLSNLWILSHPFYLGGVWPLNNHLHMNLLGYFNNLHLWSLGLQPLPPPGSPLVHLPPPPLGWPLLSELLQDLNQLPYPLLPVGPRPRPPHVLLGIFI

SEQ ID NO: 3363 - protein, 103 aa, Homo sapiens [sequence omitted]

SEQ ID NO: 3364 - protein, 209 aa, Homo sapiens [sequence omitted]

SEQ ID NO: 3365 - protein, 1263 aa, Homo sapiens [sequence omitted]

SEQ ID NO: 3366 - protein, 353 aa, Homo sapiens [sequence omitted]

SEQ ID NO: 3367 - protein, 178 aa, Homo sapiens
METGPSEEPSGRKESQEMCPPGLLVFAGSSEQDANLAKQFWISASMYPPSESQLVLRRDSSQRLPVARPRRSRGSENSHSSQSFHLASNKNRDIFAEALKIQESEEKVKYLQKTRSHSVTQNEVQWHDHGSLQPQLSRIQAKTREEILQLLRKQREERISKELISLPYKPKAKEHKAE

SEQ ID NO: 3368 - protein, 129 aa, Homo sapiens
MKRKQFKTFGLNNAIIFPEMLHLRSTVSLSIGDICKCLRGVFVFCLFVCLFVCLFLRWSLILSPKLEDSSRISAHCNLSLLGSSDSPDSASQVAKITGMHHHIQLTFVFLVETRFLQCWPGWSQTPDLR

SEQ ID NO: 3369 - protein, 230 aa, Homo sapiens
MPFPILWPRTPTNVPIARVQGPGIPPPACVSHCRPPSPDSAPRTVVLPPRTLPLSVSSSLPGLCPSRCRPPSPDSAPLGVVLPPRTLPLSVSSSLPGLCPSRCRPPSPDSAPLGVVLPPRTLPLSVSSSLPGLCPSRCRPPSPDSASLGVVLPPRTLPLVLSSSLPGLCLSRCRPPSPDSAPLGVVLPPRTLPLSVSSSLPGLCLSHCRPPSPDSWNCVSSLSPILTLRS

SEQ ID NO: 3370 - protein, 389 aa, Homo sapiens
MSEIRFTNLTWDQVITLDQVLDEVIPIHGKGNFPTMEVKPKDIIHVVKDQLIGQGIIVKDARLNGSVASYILASHNGISYKDLDVIFGVELPGNEEFQVVKDAVLDCLLDFLPKDVKKEKLSPDIMKDAYVQKLVKVCNGHDCWSLISLSNNTGKNLELKFVSSLRRQFEFSVDSFQIVLDPMLEFYSDKNAKLTKESYPVVVAESMYGDFQEAMTHLQHKLICTRKPEEIRGGGLLKYCSLLVHGFKPACMSEIKNLERYMCSRFFIDFPHIEEQQKKIESYLHNHFIGEGMTKYDYLMTLHGVVNESTVCLMSYERRQILHLITMMALKVLGELNILPNTQKVTCFYQPAPYFAAEARYPIYVIPEPPPVSFQPYHPLHFRGSNGMS

SEQ ID NO: 3371 - protein, 1350 aa, Homo sapiens
MSSPRLIPLWKDLKLLLNDTINKSKQPSEDPKNCLIVLSDRSQAVAWMKSKTEDMVEKRTFSMTERLPPIQSMVHAGSFHILVVYCGDLILRLFGDHFRAFKPLGKVPCRFNISCLCYDPEMKMLLSGILGAVVTWVIELGGTGLQIAHMVSMPGDELVQDIVLNGPSGSLLALCEAVVRVLMHQGKGQLGEVKRFTSTSSGSSITCCFTCFDQGFLYAGNQAGEIQVWSLQQGHPLHSFQAHQSGVICIRSRPEAHTLLTAGSDSLIKEWNLTSGSLLRRLELGEELYRLQFIDSITFFCQTAHSFSLHRLPCFYSLFNVCGSAPQQLRRVCCGNNWFRILCTTEDGLLRFVSPVTGDLLVITWPFSILDQAVDWAYDPGKEELFVATGSSEVLVFDTTRCPCPAKYLLGTSPNSQDFVQCLAYGHFNLGRGLEGLIFSGHQSGVIRVLSQHSCARLEKFMHFGAVLALSTLSGGIFGGQGNSLLCSYGMDDYVHLSEAVLDGVKVQLRPLASILSSCHLTHLILLPKSVGAITETNCLRLWKFHDFLSSGSQNGLKFIETLPLHLCAITSFDVCLSLSLFVTGSADGSVRIWDFHGRLIAILDSSLHFGPVCFANDRGDLLVTFNQSLYLVSCLKLLPPALLTRLSFMSISDEVLEVPKPFIPSFFFSFETMFVPKYIYPGQAQQKLVGLEKLVNNRAIAFDHSVPHVIEEDEEGSPVLLRSSMHYSLQDMEDWMQVSKRYQCHYVLPPQLQLTSWDGLNPYQILRYYFGHGREWLFAPDCYIPNSVIRARLWPEGTPIYLQCNLHAPQRELEWDRSQEFFFWHSRVRAISNTEYPKNKEEDEHFLEMRLSKDVTYSVLTDGANRSWLGRKMSEITINSMIETMLNIMVHASLLKYQCCVGALGQIFASYQVSPALRSETARRLLNDTTNSNPLIRELAWEGLKRLGMITHLFAMPLAQGLMDKDERVRIKTLSLMAEIGIHSRTSLLQLTQKQETFREMQQQMIGEEPLDHLLGMRATDLQILSTQVEQRLNENLTLSHRDEKPAFSLDVSMPSELKSSLKPPTVSEESEVAIKPSKGQRRGQAGVKKHSQKWLRGLKKTKERDSKQMSTEPGLLEDESGTEAAPIEMEEASVYSQWSSSTSVIKLSKDVDSQEKDISKDHIALTLKRLQKIRDKRDKKATAQKLKKKHKKKGKEAKVINEETTPPVMEQPVTKKVKIQGRGASGISGRRSTAGDGSSWRDDLCRLMALRISGSQTKMSENLNAELVTFAQEMLVDRHPSWELFQEICPLLKKESKVLLEDLDWDVVPPEKKPIFIQEGAIREDMIQGVTQEVIRHKEVMPREEEQA

SEQ ID NO: 3372 - protein, 676 aa, Homo sapiens
MDTDLYDEFGNYIGPELDSDEDDDELGRETKDLDEMDDDDDDDDVGDHDDDHPGMEVVLHEDKKYYPTAEEVYGPEVETIVQEEDTQPLTEPIIKPVKTKKFTLMEQTLPVTVYEMDFLADLMDNSELIRNVTLCGHLHHGKTCFVDCLIEQTHPEIRKRYDQDLCYTDILFTEQERGVGIKSTPVTVVLPDTKGKSYLFNIMDTPGHVNFSDEVTAGLRISDGVVLFIDAAEGVMLNTERLIKHAVQERLAVTVCINKIDRLILELKLPPTDAYYKLRHIVDEVNGLISMYSTDENLILSPLLGNVCFSSSQYSICFTLGSFAKIYADTFGDINYQEFAKRLWGDIYFNPKTRKFTKKAPTSSSQRSFVEFILEPLYKILAQVVGDVDTSLPRTLDELGIHLTKEELKLNIRPLLRLVCKKFFGEFTGFVDMCVQHIPSPKVGAKPKIEHTYTGGVDSDLGEAMSDCDPDGPLMCHTTKMYSTDDGVQFHAFGRVLSGTIHAGQPVKVLGENYTLEDEEDSQICTVGRLWISVARYHIEVNRVPAGNWVLIEGVDQPIVKTATITEPRGNEEAQIFRPLKFNTTSVIKIAVEPVNPSELPKMLDGLRKVNKSYPSLTTKVEESGEHVILGTGELYLDCVMHDLRKMYSEIDIKVADPVVTFCETVVETSSLKVLC

SEQ ID NO: 3373 - protein, 283 aa, Homo sapiens
MSPVTVTVQKGQRLLLPARPQPHSRRAPPQQSSSPGQGVEGDGGLRIGGPVLVPSPGCAGLDTSVREGCGWWGRPGGLANGSVFPRAPSVGAAATSRPCALVLTGLDVLRGLGVHSSRPFLHRRGFSDLEGQAAAAPKLRAPSHHAQLGPVWAAAPSHRVVQAWTCLPSAAGAPALASALGSAPLPTHPHLPAPIPSSQLALPFLGLSPALGAASARDPPPATSRKAAAWTSSSACLCAPWGLRRGWSCVSSRGQDKGGLPLAALVLSCLDQKTIQTVSLFLI

SEQ ID NO: 3374 - protein, 958 aa, Homo sapiens
MQVSAEMPLILTDHPGRTGRPTLPGKVTEEIVSSEHDEGLSFSGKVQCYGRELNQPASAAKCTGDFSPSPEKLVKSGNPLQPVSIENRNLDLKHLVLESSEPPFGPRNVIENKSLSDTLVSTTAPSGIVNVSVKQQTSPKSSQNHLFPGDLKTDEGIYLQVKSLTAASVDGAYSTQGCMCSVVPTLCSSSDNATLTHYVRPINAEPAFQAQEIPAGRMASLLKNGEPEAELHKETTGPGTAGPQSNTTSSLKGERKAIHTLQDVSTCETKELLNVGVSSLCAGPYQNTADTKENLSKEPLASFVSESFDTSVCGIATEHVEIENSGEGLRAEAGSETLGRDGEVGVNSDMHYELSGDSDLDLLGDCRNPRLDLEDSYTLRGSYTRKKDVPTDGYESSLNFHNNNQEDWGCSSWVPGMETSLPPGHWTAAVKKEEKCVPPYVQIRDLHGILRTYANFSITKELKDTMRTSHGLRRHPSFSANCGLPSSWTSTWQVADDLTQNTLDLEYLRFAHKLKQTIKNGDSQHSASSANVFPKESPTQISIGAFPSTKISEAPFLHPAPRSRSPLLVTVVESDPRPQGQPRRGYTASSLDSSSSWRERCSHNRDLRNSQRNHTVSFHLNKLKYNSTVKESRNDISLILNEYAEFNKVMKNSNQFIFQDKELNDVSGEATAQEMYLPFPGRSASYEDIIIDVCTNLHVKLRSVVKEACKSTFLFYLVETEDKSFFVRTKNLLRKGGHTEIEPQHFCQAFHRENDTLIIIIRNEDISSHLHQIPSLLKLKHFPSVIFAGVDSPGDVLDHTYQELFRAGGFVISDDKILEAVTLVQLKEIIKILEKLNGNGRWKWLLHYRENKKLKEDERVDSTAHKKNIMLKSFQSANIIELLHYHQCDSRSSTKAEILKCLLNLQIQHIDARFAVLLTDKPTIPREVFENSGILVTDVNNFIENIEKIAAPFRSSYW

SEQ ID NO: 3375 - protein, 402 aa, Homo sapiens
MSFEELCYKNPKMAIQKISDDYKIYCEKAPKIDFKMEIIKETKTVSRSNRKMSLLKRTLVRKPSMRPRNLTEVLLNTQHLEFFREFLKERKAKIPLQFLTAVQKISIETNEKICKSLIENVIKTFFQGQLSPEEMLQCDAPIIKEIASMRHVTTSTLLTLQGHVMKSIEEKWFKDYQDLFPPHHQEVEVQSEVQISSRKPSKIVSTYLQESQKKGWMRMISFIRSFCKYRRFMLNPSKRQEFEDYLHQEMQNSKENFTTAHNTSGRSAPPSTNVRSADQENGEITLVKRRIFGHRIITVNFAINDLYFFSEMEKFNDLVSSAHMLQVNRAYNENDVILMRSKMNIIQKLFLNSDIPPKLRVNVPEFQKDAILAAITEGYLDRSVFHGAIMSVFPVVMYFWKR

SEQ ID NO: 3376 - protein, 126 aa, Homo sapiens
MISVSTPDCRQSRVEGPRRVGTGGQDPRTTHSPAGWKQMAPPHPCPPSWQSAPRTGQTSSRGWPGCGHPLVGASNGARRGAWHAKSWHRVRAVTHLSHAWRPLHATRLPCPAVELVTMRQGRAGMA

SEQ ID NO: 3377 - protein, 614 aa, Homo sapiens [sequence omitted]

SEQ ID NO: 3378 - protein, 799 aa, Homo sapiens [sequence omitted]

SEQ ID NO: 3379 - protein, 216 aa, Homo sapiens
MGRGAPPLTPRLEAAQPERQQQDRGPGSGAHVAFRGRPSRGRGHGAARARSSLQAPRVSGARGPHGDRRCFSAAPGLCPPTPRAPRPLPRGPSRARRGEAEGPRAISAASRPTGSSSYRGPIRSCARASPCCARQASPALAPGRCPTPRQGRESGGRSAALRAGGRGSQTECWPPEESNPGFVQAITGWAWRGGASQRAGVWGAPGASGQGRDVAG

SEQ ID NO: 3380 - protein, 103 aa, Homo sapiens
MRVLQPERPSHTASQHNQSVKCGHAPLEHKATVCHLLCPCLHLGRRTSLICGLCPHGSYNYQTNTTTERLEGSASASHIYASVTRVLINLNAQIIGAFLAHSL

SEQ ID NO: 3381 - protein, 384 aa, Homo sapiens [sequence omitted]

SEQ ID NO: 3382 - protein, 822 aa, Homo sapiens
MELELNEKINEEITHIQEEKQDIIISFQHMQQLLRQQIQANTEMEAELKVLKENNQTLERDNELQREKVKENEEKFLNLQNEHEKALGTWKRHAEELNGEINKIKNELSSLKETHIKLQEHYNKLCNQKTFEEDKKFQNVPEVNNENSEMSTEKSENTIIQKYNTEQEIREENMENFCSDTEYREKEEKKEGSFIEEIIIDDLQLFEKSFKNEIDTVVSQDENQSEISLSKTLSLDKEVISQGQTSNVTDNRKSVTTEIKDKICLEKDNGCTEFKSPNNHFVVLDTAIETEKIHLERTRGLDVHHTDVNLEVENNKTSFNSILNETAHNTYHNNNKDVSENEPFKQFRLLPGTREHALEKEITNSDQTKADLDSSLDIKKNPVPCQKYSLRNSSNVMLDDKQCKIKQIQLLTKKSECSILLSKQTSDFLQVCNDTLEKSELTVPCDIVIDHHVSYAAFSANSKLLLKNSDKNVHSMSMLVKPNSSPGGKTMCKNMSDMQNSQFNNCLGYLENTNVNISHLHLNNENSHASQAKDVKTAVHMKTCTETEFSNKKNQIDENQVTEATKNDLFLFVSINERQHTLLNNTEKTESLNDIVSGKMFSEGQLEESHSFHIEPSGDLVNRSGRSTFDLSTSDKKTEKTPVYMNFSDPGPWSKVNHIESQTASSSTPCISLLLKERPLDPSENKKIISMALCKNIGVDDVGKDIGPDTTSINRVADTLNNWSIHPDPKGEPSEEKNAMAKTFYDSSFPTEHVKTKPLISTPLQSHLQAIKTTKNTSGDDDWQSLITNQLNKSENLLSLENDNQPKKRKAEETLEKNNRLK

SEQ ID NO: 3383 - protein, 632 aa, Homo sapiens
MTPPVLTTAETSVKPSVSAFTHSPPENTTGISSTISFHSRTLNLTDVIEELAQASTQTLKSTIASETTLSSKSHQSTTTRKAIIRHSTIPPFLSSSATLMPVPISPPFTQRAVTDNVATPISGLMTNTVVKLHESSRHNAKPQQLVAEVATSPKVHPNAKFTIGTTHFIYSNLLHSTPMPALTTVKSQNSKLTPSPWAENQFWHKPYSEIAEKGKKPEVSMLATTGLSEATTLVSDWDGQKNTKKSDFDKKPVQEATTSKLLPFDSLSRYIFEKPRIVGGKAASFTIPANSDAFLPCEAVGNPLPTIHWTRVPSGLDLSKRKQNSRVQVLPNGTLSIQRVEIQDRGQYLCSASNLFGTDHLHVTLSVVSYPPRILERRTKEITVHSGSTVELKCRAEGRPSPTVTWILANQTVVSESSQGSRQAVVTVDGTLVLHNLSIYDRGFYKCVASNPGGQDSLLVKIQVIAAPPVILEQRRQVIVGTWGESLKLPCTAKGTPQPSVYWVLSDGTEVKPLQFTNSKLFLFSNGTLYIRNLASSDRGTYECIATSSTGSERRVVMLTMEERVTSPRIEAASQKRTEVNFGDKLLLNCSATGEPKPQIMWRLPSKAVVDQQHRVAAGSTSTLMDPCLLDQ

SEQ ID NO: 3384 - protein, 107 aa, Homo sapiens
MNVAFIYCKIKDGDGQGVTASLFLALIIFLDIKSHHLFPTKKERQDHQTLQGSQEEEGKEPRNGEKLDSRDGSGDAPQSAAVENAEEELASGTFPLRSMAGGMSNIH

SEQ ID NO: 3385 - protein, 656 aa, Homo sapiens
MYPELQITNVMEANQRVSIDNWCRRDKKQCKSRFVTPFKCLVGEFVSDVLLVPEKCQFFHKERMEVCENHQHWHTVVKEACLTQGMTLYSYGMLLPCGVDQFHGTEYVCCPQTKIIGSVSKEEEEEDEEEEEDEEEDYDVYKSEFPTEADLEDFTEAAVDEDDEDEEEGEEVVEDRDYYYDTFKGDDYNEENPTEPGSDGTMSDKEITHDVKAVCSQEAMTGPCRAVMPRWYFDLSKGKCVRFIYGGCGGNRNNFESEDYCMAVCKAMIPPTPLPTNDVDVYFETSADDNEHARFQKAKEQLEIRHRNRMDRVKKEWEEAELQAKNLPKAERQTLIQHFQAMVKALEKEAASEKQQLVETHLARVEAMLNDRRRMALENYLAALQSDPPRPHRILQALRRYVRAENKDRLHTIRHYQHVLAVDPEKAAQMKSQVMTHLHVIEERRNQSLSLLYKVPYVAQEIQEEIDELLQEQRADMDQFTASISETPVDVRVSSEESEEIPPFHPFHPFPALPENEGSGVGEQDGGLIGAEEKVINSKNKVDENMVIDETLDVKEMIFNAERVGGLEEERESVGPLREDFSLSSSALIGLLVIAVAIATVIVISLVMLRKRQYGTISHGIVEVDPMLTPEERHLNKMQNHGYENPTYKYLEQMQI

SEQ ID NO: 3386 - protein, 114 aa, Homo sapiens [sequence omitted]

SEQ ID NO: 3387 - protein, 103 aa, Homo sapiens
MSSYSHSLRFWMNILETIQPTALPSCGYIYIYTYTYLFFSDRVSRCCPGWRAVALHRHSHRVLQLPTPGLEPSSFVSPMSTGEHRCGALCPAVVTDGAPDTGL

SEQ ID NO: 3388 - protein, 580 aa, Homo sapiens
MMLGDAKIGNNSVSSLKNDDFTMRGLQCDGNADDIWTASQNPKSCGKSISIETANLREYARYVLRTICQQEWVGEHCLKEPERLCTDKELILDPVLSNMQAQKLLQLICYPHGIKECTEGDNLQRQHIKRILQNLEQWTLRQSWLELQLMIKQCLKDPGSGSVAEMNNLLDNIAKATIEVFQQSADLNNSSNSGMSLFNPNSIGSADTSSTRQNGIKTFLSSSERRGVWLVAPLIARLPTSVQGRVLKAAGEELEKGQHLGSSSKKERDRQKQKSMSLLSQQPFLSLVLTCLKGQDEQREGLLTSLQNQVNQILSNWREERYQDDIKARQMMHEALQLRLNLVGGMFDTVQRSTQWTTDWALLLLQIITSGTVDMHTNNELFTTVLDMLGVLINGTLASDLSNASPGGSEENKRAYMNLVKKLKKELGDKRSESIDKVRQLLPLPKQTCDVITCEPMGSLIDTKGNKIAGFDSIDKKQGLQVSTKQKVSPWDLFEGQKNPAPLSWAWFGTVRVDRRVIKYEEQHHLLLYHTHPMPKPRSYYLQPLPLPPEEEEEEPTSPVSQEPERKSAELSDQGKTTTD

SEQ ID NO: 3389 - protein, 100 aa, Homo sapiens
MPLSPPPAGGAWAYLKTLGEVFTFLALKKRKKRQLAAEAVPGLPATSQNLHRVPLGPQSGPEALGRGTRRSSALTAPALFGFSSPRAWPEFRSPGFWSAR

SEQ ID NO: 3390 - protein, 753 aa, Homo sapiens
MDPDPQAGVQVGMRVVRGVDWKWGQQDGGEGGVGTVVELGRHGSPSTPDRTVVVQWDQGTRTNYRAGYQGAHDLLLYDNAQIGVRHPNIICDCCKKHGLRGMRWKCRVCLDYDLCTQCYMHNKHELAHAFDRYETAHSRPVTLSPRQGLPRIPLRGIFQGAKVVRGPDWEWGSQDGKPAELQRRVSADSQPFQHGDKVKCLLDTDVLREMQEGHGGWNPRMAEFIGQTGTVHRITDRGDVRVQFNHETRWTFHPGALTKHHSFWVGDVVRVIGDLDTVKRLQAGHGEWTDDMAPALGRVGKVVKVFGDGNLRVAVAGQRWTFSPSCLVAYRPEEDANLDVAERARENKSSLSVALDKLRAQKSDPEHPGRLVVEVALGNAARALDLLRRRPEQVDTKNQGRTALQVAAYLGQVELIRLLLQARAGVDLPDDEGNTALHYAALGNQPEATRVLLSAGCRADAINSTQSTALHVAVQRGFLEVVRALCERGCDVNLPDAHSDTPLHSAISAGTGASGIVEVLTEVPNIDVTATNSQGFTLLHHASLKGHALAVRKILARARQLVDAKKEDGFTALHLAALNNHREVAQILIREGRCDVNVRNRKLQSPLHLAVQQAHVGLVPLLVDAGCSVNAEDEEGDTALHVALQRHQLLPLVADGAGGDPGPLQLLSRLQASGLPGSAELTVGAAVACFLALEGADVSYTNHRGRSPLDLAAEGRVLKALQGCAQRFRVRAQDEEVHQVPGGRQQETAPRRL

SEQ ID NO: 3391 - protein, 640 aa, Homo sapiens
MEATEPQDMVVYDQSTRDASVLAADRFLSILLSKLDSCFDSVAILTGGFATFSSCFPSLCQGKPAALLPMSLSQPCLPVPSVSLTLILPHLYLGSQKDVLNKDLTTQNGISYVLNASNSTFEACDPQRTGTVAVAQVLAYLEAVTGQGPQDARLQTLANSLDPNGEGPKATVDLDTFLVVMRDWIAACQLHGGLELEEETAFQGALTSQQLPSGCPEAEEPANLESFGGEDPRPELQATADLLSSLEDLELSNRRLVGENAKLQRSMETAEEGSARLGEEILALRKQLHSTQQALQFAKAMDEELEDLKTLARSLEEQNRSLLAQARQAEKEQQHLVAEMETLQEENGKLLAERDGVKKRSQELAMEKDTLKRQLFECEHLICQRDTILSERTRDVESLAQTLEEYRVTTQELRLEISRLEEQLSQTYEGPDELPEGAQLRRVGWTELLPPSLGLEIEAIRQEVATADLSNPLCGVWQWEEVIHETSEETEFPSEAPAGGQRNFQGEPAHPEEGRKEPSMWLTRREEEEDAESQVTADLPVPLGAPRPGDIPENPPERPARRELQQALVPVMKKLVPVRRRAWGQLCLPPQRLRVTRHPLIPAPVLGLLLLLLLSVLLLGPSPPPTWPHLQLCYLQPPPV

SEQ ID NO: 3392 - protein, 116 aa, Homo sapiens [sequence omitted]

SEQ ID NO: 3393 - protein, 125 aa, Homo sapiens
MHHYAQLIFLFLVEMGFLHVGQASLELPTSGDQPAPAPQGSGITGVSHHAQVFFFFFLDGVSLLLPRLECSGTILTHRNLQPLPPGFKQLSCLSLPSSWDYRRALPHLAIFFFFFKVATEFLHVG

SEQ ID NO: 3394 - protein, 137 aa, Homo sapiens [sequence omitted]

SEQ ID NO: 3395 - protein, 113 aa, Homo sapiens [sequence omitted]

SEQ ID NO: 3396 - protein, 198 aa, Homo sapiens
MIEETSFGKSYAQLNFENSMLWMDLPDEEPDRLSNKLLQYDPSQDQWSVRAPMKYSKYRFSTAVVNSEIYVLGGIGCVGQDKGQVRKCLDVVEIYNPDGDFWREGPPMPSPLLSLRTNSTNAGAVDGKLYVCGGFHGADRHEVISKEILELDPWENQWNVVAINVLMHDSYDVCLVARMNPRDLIPPPSDLVEEGNEH

SEQ ID NO: 3397 - protein, 158 aa, Homo sapiens
MLDGGRNGRLLELSSLLPERGGGPSLCRSPASTEKEVGACGTLASLRRGLWKCSLCPGPALLLGGSCCLICSLSLLLLSTPTFFSRNFEPSFSPSPIEKPSAPSSGQSSQLQTQVQPPAERGAASMPGPASLPLSTGPSQPLRCSPRVLCSRVLALRR

SEQ ID NO: 3398 - protein, 134 aa, Homo sapiens
MQVCYIGIHMPWWFAAPINPSSTLGISPNAIPTLVPHLPNRPWCVIFPSLCPCVLIVQLPLMSENMQCLVFCSCVSLLRMMVSSFIHFPAKDMNSSFFYGCLVFHGVYMPHFLYPVYPVYLLVGIWVGSKSLLL

SEQ ID NO: 3399 - protein, 557 aa, Homo sapiens [sequence omitted]

SEQ ID NO: 3400 - protein, 556 aa, Homo sapiens
MHPMALHMVLPAHLPFLSPEVLRLLEVHVKKWMHFQRWGLPRRVEESLRQLMPNPPLYYQPGNDQPVSFNLNNTSQVSLHRSETISLQTWCSCVAGQPIQTFWVSEWSTMNPEQRHHCQQTPNPMALALPSPALKALSGPHPQSGGQDNDSGSDLQQKYSQLFCGLPSLHSESLVATFMGSQGLPKIENVPKPPLKDPFLFNELSFPQLLPKTSPQSAPPSSPLSPNWVSPSDHQRAQINVPFLTLAEYEALEWHLLQRQLQLQWGWPAALQRSQHTQCLMQHEPCGKAQSPETTTASQTGKSISVLTRELLFFPEHARKLLEFHIQKQSIRHRWGLPQKIQQSIQLLLTSTDQQTVSSSSTALANVSIPQPVALEANGACDVLSPIAAPVSIPRPHLLTQVKAILQSHIDSKCGQIHQGKIPACVHRSWDCRISGVLAVAPFPCIPESQFLVLQTASDPDLHHKVMPWMPTALDQQQQALPGTVTEHPKLLRVLSVEAIEKLETTLRHKHLAFLSGLPALYYVALPRALAPAVTSQSVITEMEPSPVEIPAEPLI

SEQ ID NO: 3401 - protein, 620 aa, Homo sapiens [sequence omitted]

SEQ ID NO: 3402 - protein, 137 aa, Homo sapiens [sequence omitted]

SEQ ID NO: 3403 - protein, 168 aa, Homo sapiens [sequence omitted]

SEQ ID NO: 3404 - protein, 1140 aa, Homo sapiens
MPQVLWPRILTFVVPAEYTEALEPLFSIIRILIMAEEKKQHSAKESTALVISTGAVKLPSPQQLLARLLVISMPASLGELRGAGAIGLLKILPEIIHPKLVDLWKTRLPELLQPLEGKNISTVLWETMLLQLLKESLWKISDVAWTIQLTQDFKQQMGSYSNNSTEKKFLWKALGTTLACCQDSDFVNSQIKEFLTAPNQLGDQRQGITSILGYCAENHLDIVLKVLKTFQNQEKFFMNRCKSLFSGKKSLTKTDVMVIYGAVALHAPKKQLLSRLNQDIISQVLSLHGQCSQVLGMSVMNKDMDLQMSFTRSITEIGIAVQDAEDQGFQFSYKEMLIGYMLDFIRDEPLDSLASPIRWKALIAIRYLSKLKPQLSLQDHLNILEENIRRLLPLPPLENLKSEGQTDKDKEHIQFLYERSMDALGKLLKTMMWDNVNAEDCQEMFNLLQMWLVSQKEWERERAFQITAKVLTKDIEAPENFKIGSLLGLLAPHSCDTLPTIRQAAASSTIGLFYIKGIHLEVERLQGLQEGLESDDVQVQIKISSKIAKIVSKFIPNEEILMFLEEMLDGLESLNPTCTKACGIWMITVLKQQGAALEDQLLEILGTIYHHMPVLRQKEESFQFILEAISQIASFHMDTVVVNLLQKPLPFDRDTKTLWKALAEKPASSGKLLQALIDKLETELEDDIARVEAISVACAMYEVISMGTSVTGLYPELFTLLLKLVSCTLGQKMPTCPWSHRRHVMQQGEQQQIPDPCRLSTATLKCLQAQAMREGLAKESDEGDNLWTLLSSPSTHHIGVCSLARSMAVWQHGVILDIMEQLLSSLTSSSENYRITGAAFFSELMKEPILWKHGNLRNVLILMDQSAWDSNATLRQMAIRGLGNTASGAPHKVKKHKQLMLESIIRGLYHLARTEVVCESLKALKKILELLTDRDVSFYFKEIVLQTRTFFEDEQDDVRLTAIFLFEDLAPLTGRRWKIFFAEEIKKSLISFLLHLWDPNPKIGVACRDVLMVCIPFLGLQELYGVLDRLLDQDLPRARDFYRQFCVKLAKKNQEILWILHTHSFTFFTSTWEVIRSAAVKLTDAVVLNLTSQYVELLDREQLTTRLQALRQDPCISVQRAAEAALQTLLRRCKETSIPL

SEQ ID NO: 3405 - protein, 126 aa, Homo sapiens
MAETERNDEEQFECQELLECQVQVEAEAVAAGWMLDFLCLSLCRAFRDGRSEDFRRTRNSAEGECRPRPGRDYAGGGCGLRGARQRAGSLRRRGRSGERGCCGRLAGSPRLRAELCSNPGSPVVST

SEQ ID NO: 3406 - protein, 385 aa, Homo sapiens
MVAVSSELLGTLPRWGGLAEALLTSQMGRPGRGAPHLPDGAAWQRRSSPPRRGGRAEALPTSQMGRPGRGAPHLPDDGRSGRGAPHLPDEGRPGRGAPHLPGGAAGQRRPSPPRRGGRAEAPLTSQAGRPGRGAPHLPDGAAGQRLPQPPRGRAAGQRSPSPPRQGGRAEALLTSQTGRPGRGSPNLPDEGRPGRGAPHLPGRAAGQRRSSPPRRGGRAEALLTSQTMGGRAEALLTSQTGQLGRGAPHFPDGAAGQRRSSHPRRWAARQRRSSHPRRWAAGQRRSSPPRRGGRAEALLASQTGWWPGRDAPRLQDGVAAGHRCSSPPRRGGGAEALLTSQTEQPGRGAPHFPDVSVRQRRSSHPRRWAAEQRHSSHPRRWAARQ

SEQ ID NO: 3407 - protein, 412 aa, Homo sapiens
MKRHEMVAKPPAMCSHFAKDLRPEQYIKNSFQQVILRRYGKCGYQKGCKSVDEHKLHTGGHKGLNRCVTTTQSKIVQCDKYVKVFHKYSNAKRHKIRHTGKNPFKCKECGKSFCMLSQLTQHEIIHTGEKPYKCEECGKAFKKSSNLTNHKIIHTGEKPYKCEECGKAFNQSSTLTRHKIIHTGEKLYKCEECGKAFNRSSNLTKHKIVHTGEKPYKCEECGKAFKQSSNLTNHKKIHTGEKPYKCGECGKAFTLSSHLTTHKRIHTGEKPYKCEECGKAFSVFSTLTKHKIIHTEEKPYKCEECGKAFNRSSHLTNHKVIHTGEKPYKCEECGKAFTKSSTLTYHKVIHTGKKPYKCEECGKAFSIFSILTKHKVIHTEDKPYKCEECGKTFNYSSNFTNHKKNSYWRETL

SEQ ID NO: 3408 - protein, 194 aa, Homo sapiens [sequence omitted]

SEQ ID NO: 3409 - protein, 664 aa, Homo sapiens [sequence omitted]

SEQ ID NO: 3410 - protein, 540 aa, Homo sapiens
MGRCRQDNGGSSGPTEQAAWRYSQTHQAILGPFGELLTEDDLVYLEKQIADLQLRRRCQEYESELGRLAAELQALLPEPLVSITVNSHFLPRAPGLEVEEASIPAAEPAGSAEASEVAPGVQPLPFWCSHISRLVRSLSLLLKGVHGLVQGDEKPSTRPLQDTCREASASPPRSEAQRQIQEWGVSVRTLRGNFESASGPLCGFNPGPCEPGAQHRQCLSGCWPALPKPRSGLASGEPRPGDTEEASDSGISCEEVPSEAGAAAGPDLASLRKERIIMLFLSHWRRSAYTPALKTVACRTLGARHAGLRGQEAARSPGPPSPPSEGPRLGHLWQQRSTITHLLGNWKAIMAHVPARQLRRLSRQPRGALSPEQFLPHVDGAPVPYSSLSLDLFMLGYFQLLECDLPAEERKLRHLLCFEVFEHLGTHGWEAVRAFHKAVTDEVAAGRRAWTDGFEDIKARFFGSSQRPAWDTEPGRKSGLTLLGPLPHAAVPCSGPEPTAQRLGSRSQQGSFNGEDICGYINRSFAFWKEKEAEMFNFGE

SEQ ID NO: 3411 - protein, 183 aa, Homo sapiens [sequence omitted]

SEQ ID NO: 3412 - protein, 210 aa, Homo sapiens
MPVSPAPVAVSLVPAPATAPAPRPLGSIQRPNSFLFRSSSQSGSGPSSPDSVLRPRRYPQVPDEKDLMTQLRQVLESRLQRPLPEDLAEALASGVILCQLANQLRPRSVPFIHVPSPAVPKLSALKARKNVESFLEACRKMGVPEADLCSPSDLLQGTARGLRTALEAMKRVGGKALPPLWPPSGLGGFVVFYVVLMLLLYVTYTRLLGS

SEQ ID NO: 3413 - protein, 799 aa, Homo sapiens [sequence omitted]

SEQ ID NO: 3414 - protein, 455 aa, Homo sapiens
MGKLVTRRLLGRRGSVAFPGQKGKCGVPWREGRVWRPLERRASVASPGQKGECGVPWREGPVWRPLERRGSVASPGEKGECGVPWREGGVWRPLERRGSVASPGEKGECGVPWREGGVWRPLERRGSVASPGEKGECGVPWREGGVWRPLERRASVASPGQKGECGVPWREGPVWRPLERRASVASPGEKGECGVPWREGGVWRPLERRGSVASPGEKGECGVPWTEGGVWRPLERRASVASPGEKGECGVPWTEGGVWRPLERRGSVASPGEKGQCGVPWTEGGVWRPLERRASVASPGQKGECGVPWREGRVWRPLERRASVASPGQKGECGVPWREGPVWRPLERRGSVASPGEKGECGVPWREGGVWRPLERRGSVASPGEKGECGVPWREGGVWRPLDRRGSVASPGEKGECGVRWREGRVWYSLDRRGSVPAALASQRHALLALPQPQG

SEQ ID NO: 3415 - protein, 844 aa, Homo sapiens
MGFQPNTAGSECEDVDECENHLACPGQECVNSPGSFQCRTCPSGHHLHRGRCTDVDECSSGAPPCGPHGHCTNTEGSFRCSCAPGYRAPSGRPGPCADVNECLEGDFCFPHGECLNTDGSFACTCAPGYRPGPRGASCLDVDECSEEDLCQSGICTNTDGSFECICPPGHRAGPDLASCLDVDECRERGPALCGSQRCENSPGSYRCVRDCDPGYHAGPEGTCDDVDECQEYGPEICGAQRCENTPGSYRCTPACDPGYQPTPGGGCQDVDECRNRSFCGAHAVCQNLPGSFQCLCDQGYEGARDGRHCVDVNECETLQGVCGAALCENVEGSFLCVCPNSPEEFDPMTGRCVPPRTSAGTFPGSQPQAPASPVLPARPPPPPLPRRPSTPRQGPVGSGRRECYFDTAAPDACDNILARNVTWQECCCTVGEGWGSGCRIQQCPGTETAEYQSLCPHGRGYLAPSGDLSLRRDVDECQLFRDQVCKSGVCVNTAPGYSCYCSNGYYYHTQRLECIDNDECADEEPACEGGRCVNTVGSYHCTCEPPLVLDGSQRRCVSNESQSLDDNLGVCWQEVGADLVCSHPRLDRQATYTECCCLYGEAWGMDCALCPAQDSDDFEALCNVLRPPAYSPPRPGGFGLPYEYGPDLGPPYQGLPYGPELYPPPALPYDPYPPPPGPFARREAPYGAPRFDMPDFEDDGGPYGESEAPAPPGPGTRWPYRSRDTRRSFPEPEEPPEGGSYAGSLAEPYEELEAEECGILDGCTNGRCVRVPEGFTCRCFDGYRLDMTRMACVDINECDEAEAASPLCVNARCLNTDGSFRCICRPGFAPTHQPHHCAPARPRA

SEQ ID NO: 3416 - protein, 119 aa, Homo sapiens
MSVSMKMVSLCIGHCRGERKELRGPCRTQPVGKGLPFSPASRSPGVWFPVLNHLHQPGLCSNCGAQRRRGPASPPSLHVQVRCLRPRETAWSPPTVPTGARPQTRSSSVSAGSEAVRSF

SEQ ID NO: 3417 - protein, 105 aa, Homo sapiens [sequence omitted]

SEQ ID NO: 3418 - protein, 1576 aa, Homo sapiens
MENILCFLNSYTETGLSPDSHWLDIDPNFICLSGLGLFILYLFYVVLTLYSSPTEKNNDIQKHQGRAKRRRKGGTFKGFPDWKSFQREEEEERKLLSLLKSFGPPVSCSPRGQHHDTNHFRRLLCPDPVCRVCKRATADIQQLLSWESLKDAAPSVSPLASSASATESSFTLASTPSATPPEDLILSPRPKASPPPPLILSPDLITTLADLFSPSPLRDPLPPQPVSPLDSKFPIDHSPPQQLPFPLLPPHHIERVESSLQPEASLSLNTIFSFGSTLCQDISQAMNPIDSCARHHGPPIPSALPPEDCTVTQSKSSLTILKTFPEMLSLGGSGGSSTSAPTIKGIDHSHLASSEFTWWQPHAKDSFSSNFVPSDFMEELLTLHSSEAFLGGHSVANLIEPVNISFLSHDILALLERQVKKRGDFLMWKENGKKPGSFPKQLRPNYQLNSSRNMLTSIAVKHDLAESFPFWASKGKLEWQHIHQQPPHSKCFEDHLEQKYVQLFWGLPSLHSESLHPTVLVQRGHSSMFVFFNGITNTSISHESPVLPPPQPLSLPSTQPLPLPQTLPQGQSPHLTQVKSLAQPQSPFRALLPSPLFLIRICGVCFHRPQNEARSLLPSEINHLEWNVLQKVQESLWGLPSVVQKSQEDFCPPAPNPELVRKSFKVHVPISIIPGDFPLSSEVRKKLEQHIRRRLIQRRWGLPRRIHESLSLLRPQSKISELSVSERIHGPLNISLVEGQRCNVLKKSASSFPRSFHERSSNMLSMENVGNYQGYSQETVPKDHLLHGPETSSDKDLRSNSERDLETHMMHLSGNDSGVRLGQKQLENALTVRLSKKFEEINEGRMPGTVHSSWHSVKQTMSLPEKSHSQIKHRNLVTLVSEDHCVDTSQEISFLSSNKQKMLEAHIKTFRMRMLWGLPLKVLESIEIFKSKADLSTSFSHFDLPSSATFISQGDSKDGVSKSRSRSTFQGEKLGTTSSVPILDRPHPVSSPVVQEGQGTLRRQFSDTDHDLIETDSKDGASTSLRRGTTDFQSEKLDSTSSFPILGHSYLVTSPVNQEKQGTLRREFSDTDNDLTESVRTTEDGRQTFLPPPHSIVDEVSQKQTVLASRCSAELPIMQAGAGCESWDKRKSSFHNVDRLQGSRKTFPVTNALQSQTRNNLTTSKSGSCSLTNVKASTSNETEIFPPRISVPQDPKSSYLKNQMLSQLKLVQRKHSQPQSHFTDMSFALDNLSSKDLLTNSQGISSGDMGTSQVVHVHLEDSGIRVAQKQEPRVPTCVLQKCQVTNFPPAVNRVSPVRPKGGELDGGDAGLGTSQRRRKSLPVHNKTSGEVLGSKSSPTLKTQPPPENLFRKWMKTSLQWFNKPSISYEEQESSWEKGSSLSSCVQNIGRVIRAAFTGTTEAQKIRKDTREFLEEKLGHRHGIDITCPQEPLSFPVGLGKAQHNPEVHVRAEPVQGCPCNYRAPSCKVTRTKSCSQQAIFVGQNYPTRIRQIIDKDRQPQKVEAFKGKILCQSHPQSMPHRKPVPHPNPTCRRQVSLVCPAVPTSAKSPVFSDVPFLTGQKMLPKHLQGGKFPPTK

SEQ ID NO: 3419 - protein, 976 aa, Homo sapiens
MGNLESAEGVPGEPPSVPLLLPPGKMPMPEPCELEERFALVLSSMNLPPDKARLLRQYDNEKKWDLICDQERFQVKNPPHTYIQKLQSFLDPSVTRKKFRRRVQESTKVLRELEISLRTNHIGWVREFLNDENKGLDVLVDYLSFAQCSVMYSTLPGRRALKNSRLVSQKDDVHVCILCLRAIMNYQYGFNLVMSHPHAVNEIALSLNNKNPRTKALVLELLAAVCLVRGGHEIILAAFDNFKEVCKELHRFEKLMEYFRNEDSNIDFMVACMQFINIVVHSVEDMNFRVHLQYEFTKLGLEEFLQKSRHTESEKLQVQIQAYLDNVFDVGGLLEDAETKNVALEKVEELEEHVSHLTEKLLDLENENMMRVAELEKQLLQREKELESIKETYENTSHQVHTLRRLIKEKEEAFQRRCHLEPNVRGLESVDSEALARVGPAELSEGMPPSDLDLLAPAPPPEEVLPLPPPPAPPLPPPPPPLPDKCPPAPPLPGAAPSVVLTVGLSAIRIKKPIKTKFRLPVFNWTALKPNQISGTVFSELDDEKILEDLDLDKFEELFKTKAQGPALDLICSKNKTAQKAASKVTLLEANRAKNLAITLRKAGRSAEEICRAIHTFDLQTLPVDFVECLMRFLPTEAEVKLLRQYERERQPLEELAAEDRFMLLFSKVERLTQRMAGMAFLGNFQDNLQMLTPQLNAIIAASASVKSSQKLKQMLEIILALGNYMNSSKRGAVYGFKLQSLDLLLDTKSTDRKMTLLHFIALTVKEKYPDLANFWHELHFVEKAAAVSLENVLLDVKELGRGMELIRRECSIHDNSVLRNFLSTNEGKLDKLQRDAKTAEEAYNAVVRYFGESPKTTPPSVFFPVFVRFIRSYKEAEQENEARKKQEEVMREKQLAQEAKKLDAKTPSQRNKWQQQELIAELRRRQAKEHRPVYEGKDGTIEDIITGLHCQPMVVRHQARSAAPPSGPPRAPGPH

SEQ ID NO: 3420 - protein, 149 aa, Homo sapiens
MERIEGASVGRCAASPYLRPLTLHYRQNGAQKSWDFMKTHDSVTVLLFNSSRRSLVLVKQFRPAVYAGEVERRFPGSLAAVDQDGPRELQPALPGSAGVTVELCAGLVDQPGLSLEEVACKEAWEECGYHLAPSDLRRVATYWDATMGS

SEQ ID NO: 3421 - protein, 161 aa, Homo sapiens
MYPFGIFFFSFFFLSSRTHVSIYFSENMLVKILHAFVSLEMSLFCLLVWRVSFFLSFFPSFSLSLSSSLPPLSFFLFLSFSFFFFPFLSFFLSFFFFPSFFLFSFLLSLFPSFFLSLSLSFFLFFRVSLCHPGWSGAVAQSQNTATSAFQAQAILLSQPPK

SEQ ID NO: 3422 - protein, 133 aa, Homo sapiens
MMVKGSIQQENLTILNIYAPNTGAPRFIKQARKDLQRDTLSHSNSGRLQHPTDSIRSLRQKINKDIQDLNSALDQMDLIDLYRSLHPKTTEHTFFSLPHGTYSQIDHIIGHKTSSTYVKELKSYQTYSRFTAQ

SEQ ID NO: 3423 - protein, 191 aa, Homo sapiens
MPGAIDDHCPAQPGEEGTAFNVTMGYKYPPLCLGHATRCIHLETQVWAAYLLERLATGKWGHLVSGLSLCPLRQMKRGVIGDTPYFQYKPVGKLCPKNFEGPSKTLIWGDCVNSHAVVLKNDSYALVIDWAPKGYLKNTCSSGGGEFLEATYFISYWEDEDHHPTLHRWFGSFFTLKWEDKDITLHPQGLV

SEQ ID NO: 3424 - protein, 286 aa, Homo sapiens
MAMCGSCPCPMRPTDFLGYGAPVPGRPWPWRASPAVQRQPLSSCTASASLHLHSVSLSPPAQRLGAAASPPAQRQPLSTCTASASLHLHSGWEQQPLHRHSGSLSPPAQRQPLSTCTASASLHLHSGWEQQSLHLHSGSLSPPAQRQPLHLHSVSLSPPAQWLGAAASPPAQRQPLSTCTASASLHLHSGWEQQPLHRHSGSLSPPARQQPLHRHSGSLSPPARWQPLSTCTAAGSSSLSTCTTAASLHLHSSWEQQPRRVAAKMEFPHVMSGQHPPHTAQSAGLW

SEQ ID NO: 3425 - protein, 229 aa, Homo sapiens [sequence omitted]

SEQ ID NO: 3426 - protein, 103 aa, Homo sapiens
MYCLIPEHGRKAGSLLGMLFSGGQAKLWGTASESLCSQSAADTCRQSPLLQDVPLHGELPEAEKGATDLKAAQRRVLPKAQGDRCLVSAGVYSKPKGSPVSKW

SEQ ID NO: 3427 - protein, 182 aa, Homo sapiens
MSLLPTTCLSPTGRRCGSCQKTPEPVIKAKDLSAQQVPASLNKTSLKEISGERLSSIPEASEYDWRNYQPSQMSESELQMLASLRWQQNEELEDAGTSHGLSASQVDNCNVSISTSSDDTTTWNSCLPPPVNQGRHYQKEMNPPSPSNPRDWLNMLSPPIVPPSQQPAEQRPDSCESLSVQG

SEQ ID NO: 3428 - protein, 148 aa, Homo sapiens
MNFTLMVAMEHTTTMASATPAPWPHRSQRCRQAVPGHPASGCCGTGTFRTQRRPGDKSRRAGSRGRGAGPGRHDRDSAHAGSMRGARLVPALVRLQLRPPALRGERTPISMPPARPPAGVAFPGASAGPSRTRRGVATAGGRRAPAVI

SEQ ID NO: 3429 - protein, 547 aa, Homo sapiens
MGGCIPFLKAARALCPRIMPPLLLLSAFIFLVSVLGGAPGHNPDRRTKMVSIHSLSELERLKLQETAYHELVARHFLSEFKPDRALPIDRPNTLDKWFLILRGQQRAVSHKTFGISLEEVLVNEFTRRKHLELTATMQVEEATGQAAGRRRGNVVRRVFGRIRRFFSRRRNEPTLPREFTRRGRRGAVSVDSLAELEDGALLLQTLQLSKISFPIGQRLLGSKRKMSLNPIAKQIPQVVEACCQFIEKHGLSAVGIFTLEYSVQRVRQLREEFDQGLDVVLDDNQNVHDVAALLKEFFRDMKDSLLPDDLYMSFLLTATLKPQDQLSALQLLVYLMPPCHSDTLERLLKALHKITENCEDSIGIDGQLVPGNRMTSTNLALVFGSALLKKGKFGKRESRKTKLGIDHYVASVNVVRAMIDNWDVLFQVPPHIQRQVAKRVWKSSPEALDFIRRRNLRKIQSARIKMEEDALLSDPVETSAEARAAVLAQSKPSDEGSSEEPAVPSGTARSHDDEEGAGNPPIPEQDRPLLRVPREKEAKTGVSYFFP

SEQ ID NO: 3430 - protein, 120 aa, Homo sapiens
MRRGGSLGAQNQADGAGCRNKVKTILIANSCLRRKHPSNLRGGALPGHPSVPESPPRPELSGSYRRGGQLFPSKLESRPRFPRIMKGTAFFDLDFRPDPPLSRSPTFSAGCNSVGTAPLF

SEQ ID NO: 3431 - protein, 1047 aa, Homo sapiens [sequence omitted]

SEQ ID NO: 3432 - protein, 125 aa, Homo sapiens
MTVPTPGWTGGCEMDQGALGQATIHAWPLPPSGSPSSSPRPLGPGTLGTSRVGHPAGPLCHWVAAGRSRAVCSGTVEDLGSAPSCVAVAVSPSPRVTTRAQDSEGPAQTPQFPSFQEWREAQEYV

SEQ ID NO: 3433 - protein, 123 aa, Homo sapiens
MLLVHFHIPPVHLAPPFKFLEDSSSRISKSTNVFDLSDKCIEKMLTYAVLPLCFGYHKGKGCLSRGQVTCLTLSITWDDSLSLPCPFALYTINSNASRHSGPSCLSYCLCLVSYFPMISCLHT

SEQ ID NO: 3434 - protein, 766 aa, Homo sapiens [sequence omitted]

SEQ ID NO: 3435 - protein, 289 aa, Homo sapiens [sequence omitted]

SEQ ID NO: 3436 - protein, 798 aa, Homo sapiens [sequence omitted]

SEQ ID NO: 3437 - protein, 275 aa, Homo sapiens
MGPLHSHTSWGASPTPLTGTDPSHVQGEVLKERPDVVAGVDLLHLHLRVHVAVVHEVHIGHFHLGSGREVRGASRAAWPGSPCHNAPVPWPPVPAHFPGFASPTLPVPWLYPPLRPISSRLAQSPDPHLSDAVLMRHHRHHVLQRQQGGALDLSVDVFALGTGGQQVHQGNVVHEGAVVLHAVAGGLHHVQQVGQRCLIIVEHDHIVTCIGQLRAGGGTCHTLSVQQALGSPLLCLPGRNWDSDHSPYLKSGKPSPGWDLGVPQLMSQALCQQRY

SEQ ID NO: 3438 - protein, 1508 aa, Homo sapiens
MFPARGVPLHLEGEGVFPWGPGDVSLPYLSTSDVSFSVIVENVNCYSSGMICRKFISINVGNSLIVFDDDSGNPSPESFLDDKQEVHTWRVGFFTLVHFPQEHITLLWDQRTTVHVQAGPQWQGQLAGLCGNFDLKTINEMRTPENLELTNPQEFGSSWAAVECPDTLDPRDMCVLNPLREPFAKKECSILLSEVFEICHPVVDVTWFYSNCLTDTCGCSQGGDCECFCASVSAYAHQCCQHGVAVDWRTPRLCLLGKGPYQLSSLAAGGALVGMKAVGDDIVLVRTEDVAPADIVSFLLTAALYKAKAHDPDVVSLEAADRPNFFLHVTANGSLELAKWQGRDTFQQHASFLLHRGTRQAGLVALESLAKPSSFLYVSGPVLALRLYEHTEVFRRGTLFRLLDAKPSGAAYPICEWRYDACASPCFQTCRDPRAASCRDVPRVEGCVPVCPTPQVLDEVTQRCVYLEDCVEPAVWVPTEALGNETLPPSQGLPTPSDEEPQLSQESPRTPTHRPALTPAAPLTTALNPPVTATEEPVVSPGPTQTTLQQPLELTASQLPAGPTESPASKGVTASLLAIPHTPESSSLPVALQTPTPGMVSGAMETTRVTVIFAGSPNITVSSRSPPAPRFPLMTKAVTVRGHGSLPVRTTPPQPSLTASPSSRPVASPGAISRSPTSSGSHKAVLTPAVTKVISRTGVPQPTQAQSASSPSTPLTVAGTAAEQVPVSPLATRSLEIVLSTEKGEAGHSQPMGSPASPQPHPLPSAPPRPAQHTTMATRSPALPPETPAAASLSTATDGLAATPFMSLESTRPSQLLSGLPPDTSLPLAKVGTSAPVATPGPKASVITTPLQPQATTLPAQTLSPVLPFTPAAMTQAHPPTHIAPPAAGTAPGLLLGATLPTSGVLPVAEGTASMVSVVPRKSTTGKVAILSKQVSLPTSMYGSAEGGPTELTPATSHPLTPLVAEPEGAQAGTALPVPTSYALSRVSARTAPQDSMLVLLPQLAEAHGTSAGPHLAAEPVDEATTEPSGRSAPALSIVEGLAEALATTTEANTSTTCVPIAEQDCVRHICLEGQLIRVNQSQHCPQGAAPPRCGILGLAVRVGGDRCCPLWECACRCSIFPDLSFATFDGSHVALFKEAIYILSQSPDEMLTVHVLDCKSANLGHLNWPPFCLVMLNMTHLAHQVTIDRFNRKVTVDLQPVWPPVSRYGFRIEDTGHMYMILTPSDIQIQWLHSSGLMIVEASKTSKAQGHGLCGICDGDAANDLTLKDGSVVGGAEDPAPFLDSWQVPSSLTSVGQTRFRPDSCATTDCSPCLRMVSNRTFSACHRFVPPESFCELWIRDTKYVQQPCVALTVYVAMCHKFHVCIEWRRSDYCPFLCSSDSTYQACVTACEPPKTCQDGILGPLDPEHCQVLGEGCVCSEGTILHRRHSALCIPEAKCACGDCPDSIPECQEGEALTVHRNTTELCCPLYQCVCENFRCPQVQCGLGTALVEVWSPDRCCPYKSCG

SEQ ID NO: 3439 - protein, 516 aa, Homo sapiens
MQDEVGGFGTGRLQVAGVRVTVAALFAPAAPVVRLNVFAQVVAAHEALVAHRTGEALLARVSPQMPLQLVRAREALAAEEPVAHEGPLARVPAQVRLQVRRLPVHLAAARNVAAVQALAPQARPGRAQPLRLLAVGAVAGGAARVAAGRACRAPPGGGSRGARYHGAGGGGCHGGAGVRIGGQHRLEAVLGQQVLAGGEQVGGGGGGGAEARGAEGGVRERAEVGVVGAQLRVQRGLGGARVQRALEPPSGVLHFQPRARAAVHVPPRRRRAVGHLAGRQRRMEARLVPGLVRVRHAHARVQPVGCRRVHLGNEGRLATRLLRGHPGRCRRGSRRVGEEAAVVAAEGGRRGRRGGQAEGAVGGARAARQAARATAPGGHREAREAGAEVAAGRGALPGVKAAFGEGARLWQRRQRARVADLVAGRRQHGQRGRSEARLFLEWVGWGREQEGGGQEEVGEETKCTREQPRPLRLLPGGPGSPPRASSPRARGGVAAPGAEQGRSPGRRSRRRKVALR

SEQ ID NO: 3440 - protein, 203 aa, Homo sapiens [sequence omitted]

SEQ ID NO: 3441 - protein, 112 aa, Homo sapiens [sequence omitted]

SEQ ID NO: 3442 - protein, 1183 aa, Homo sapiens
MQAIIQGFSYDLLKKIDSPQRLVYSPSWCGGLVQGNPNGSPNRLLKAGVISAQNIYSFGFGKFYLTGATQMAYLGSLPVIGEKEVIQADDEPTFSFFSGPYMVMTNLVWNGSRVTVKELNLPTHPHCSRLRLADLLIAEQEHSSKLRHPYLLQLMAVCLSQDLEKTRLVYERITIGTLFSVLHERRSQFPVLHMEVIVHLLLQISDALRYLHFQGFIHRSLSSYAVHIISPGEARLTNLEYMLESEDRGVQRDLTRVPLPTQLYNWAAPEVILQKAATVKSDIYSFSMIMQEILTDDIPWKGLDGSVVKKAVVSGNYLEADVRLPKPYYDIVKSGIHVKQKDRTMNLQDIRYILKNDLKDFTGAQRTQPTESPRVQRYGLHPDVNVYLGLTSEHPRETPDMEIIELKEMGSQPHSPRVHSLFTEGTLDPQAPDPCLMARETQNQDAPCPAPFMAEEASSPSTGQPSLCNFEINEIYSGCLILEDDIEEPPGAASSLEADGPNQVDELKSMEEELDKMEREACCFGSEDESSSKAETEYSFDDWDWQNGSLSSLSLPESTREAKSNLNNMSTTEEYLISKCVLDLKIMQTIMHENDDRLRNIEQILDEVEMKQKEQEERMSLWATSREFTNAYKLPLAVGPPSLNYIPPVLQLSGGQKPDTSGNYPTLPRFPRMLPTLCDPGKQNTDEQFQCTQGAKDSLETSRIQNTSSQGRPRESTAQAKATQFNSALFTLSSHRQGPSASPSCHWDSTRMSVEPVSSEIYNAESRNKDDGKVHLKWKMEVKEMAKKAATGQLTVPPWHPQSSLTLESEAENEPDALLQPPIRSPENTDWQRVIEYHRENDEPRGNGKFDKTGNNDCDSDQHGRQPRLGSFTSIRHPSPRQKEQPEHSEAFQASSDTLVAVEKSYSTSSPIEEDFEGIQGAFAQPQVSGEEKFQMRKILGKNAEILPRSQFQPVRSTEDEQEETSKESPKELKEKDISLTDIQDLSSISYEPDSSFKEASCKTPKINHAPTSVSTPLSPGSVSSAASQYKDCLESITFQVKTEFASCWNSQEFIQTLSDDFISVRERAKKLDSLLTSSETPPSRLTGLKRLSSFIGAGSPSLVKACDSSPPHATQRRSLPKVEAFSQHHIDELPPPSQELLDDIELLKQQQGSSTVLHENTASDGGGTANDQRHLEEQETDS

SEQ ID NO: 3443 - protein, 116 aa, Homo sapiens [sequence omitted]

SEQ ID NO: 3444 - protein, 122 aa, Homo sapiens
MTTPILFFFSKIVLAILILVPFHIKFRISLSISTKRPSDTLLEIVLKQLTSLRGIDIFTILGLSIHERICLLIIWVFFNFFISILHFSACRFYTYFVRFIAKFLGGAIANSIEFLMLNSNYY

SEQ ID NO: 3445 - protein, 799 aa, Homo sapiens
MALTTGKHEGYVHFGTIRDGQVSFEMLPRQWSVCEQIGVTTCSIIWSEYIAGEYTLLLLVESGYGNASKRFQVVSYNTASDDLELLYHIPEFIPEARGLEFLMILGTESYTSTAMAPKGIFCNPYNNLIFIWGNFLLQSSNKENFIYLADFPKELSIKYMARSFRGAVAIVTETEEIWYLLEGSYRVYQLFPSKGWQVHISLKLMQQSSLYASNETMLTLFYEDSKLYQLVYLMNNQKGQLVKRLVPVEQLLMYQQHTSHYDLERKGGYLMLSFIDFCPFSVMRLRSLPSPQRYTRQERYRARPPRVLERSGFHNENSLAIYQGLVYYLLWLHSVYDKPYADPVHDPTWRWWANNKQDQDYYFFLASNWRSAGGVSIEMDSYEKIYNLESAYELPERIFLDKGTEYSFAIFLSAQGHSFRTQSELGTAFQLHSQVDVGVVLADPGCIEASVKQEVLINRNSVLFSITLKDKKLCYDQGISGHHLMETSMTVNVVGSSGLCFQETHLGPHMQGNLMVPVFIGCPPGKRLAFDITYTLEYSRLKNKHYFDCVNVNPEMPCFLFRDIFYPFFLIQDLVTGDSGSFRGSYVLLVVGGGPTLDSLKDYSEDEIYRFNSPLDKTNSLIWTTRTTRTTKDSAFHIMSHESPGIEWLCLENAPCYDNVPQGIFAPEFFFKVLVSNRGVDTSTYCNYQLTFLLHIHGLPLSPKRALFIIMVSASVFVGLVIFYIAFCLLWPLVVKGCTMIRWKINNLIASESYYTYASISGISSMPSLRHSRMGSMFSSRMTEDRAEPKEAVERQLMT

SEQ ID NO: 3446 - protein, 392 aa, Homo sapiens [sequence omitted]

SEQ ID NO: 3447 - protein, 103 aa, Homo sapiens
MAIGCFMFRFPPWLQSLTENLCARPCAASFTHITVLTHSGCFNKVPSTGWLINNTNGFLTVLETESPRSECQHGGILVGALLRVADCYLLTMSSHRGRGKRAL

SEQ ID NO: 3448 - protein, 105 aa, Homo sapiens [sequence omitted]

SEQ ID NO: 3449 - protein, 146 aa, Homo sapiens [sequence omitted]

SEQ ID NO: 3450 - protein, 259 aa, Homo sapiens; identical to SEQ ID NO: 2608

SEQ ID NO: 3451 - protein, 952 aa, Homo sapiens [sequence omitted]

SEQ ID NO: 3452 - protein, 153 aa, Homo sapiens
MKETWEMLPGKPGIWALDHFGVNLPSAHPSFGGSWGEEKCSRTMRFAASQGKLDLNGYQKSGASSWRKAARGLRLQGGLRSTAPSLSLSYPVASSIPAGRLHFLSLPPTAGLLLLFGDRISLCRPGWSAVARSRLTATSASRVEAILLPQPPE

SEQ ID NO: 3453 - protein, 185 aa, Homo sapiens
MGGSGRCLGRVEILHQGAWGTVCDDLWDLNEAKVVCRQLGFGQAVSGPGEAHFGPGSGDIFLDNLQCTRVEHYLGQCTHLGWSEHNCGHHEDASVICSDAEDLPPPTPPDSSTASQDHIKGGSNSCGGVISSLSGSFSSPQYPENYPTDIQCVWEIHMGAKFHIELIIPSLKVIQSKDRRLCHLH

SEQ ID NO: 3454 - protein, 679 aa, Homo sapiens
MLSMENVGNYQGYSQETAPKDHLLHDPETSSDEDLRSNSERDLETHMMHLSGNDSGVRLGQKQLENALTVRLSKKFEKINEGRMPGTVHSSWHSVKQTMSLPEKSQSQIKHQNLVALVSEDHCVDTSQEISFLSSNKQKMLEAHIKTFRMRMLWGLPCKVLESIEIFKSEEDISNSFSHFYLPSSASFISQGDSKDGVSKSCRRSTFQGEKLGTTSSVPVLNHPQPVSSPIGKEGQGTLRRQFSDIDHDLIETDAKDGASTPLRRGTTYFQGEKLETTSSFSILGHPHLVTSPVDQEKQGTLRREFADTDEDLTESVWTTEDGRQTFLPPTYSIIDEVSQKQTVLASRCSAELPILQAGVGRDSRDKRESASNNVNRLQGSGKTFPVTNGSKEMFKEEEICTLQSQTRNNLTTSKSGSCLVTNVKRSTSHETEIFPPRISVPQTPKSSYLKNQMLSQLKLVQRKHSQPQSHFTGMSLALDNLSSKDLLTHAQGISNQDLGTSQVLHVHLEVRGIRVAQQQEHRVPTHVLQKCQVKNFSPAAKRVSPLRPNGGELGGGDAGLGTSQLTRKSLPVHNKASGEVPGSKSSPTLKTQPPSENLFRKWMQTLLQWFNKPSIMCEEQESSWEKGSSLSSSVQNRSRVTSRAAFTGATEAQKIRKDTGEFLEEKLGHSHGIDITCP

SEQ ID NO: 3455 - protein, 120 aa, Homo sapiens
MGRLAGRRANPPHLPPGRGGCWAETLLTSQMGWLPGGEAPHFSDGAAAGRRGSSLLRRGGCQAEGLLTSQTGRPGRDAPHLPDGVSAGQRRSSHPRWGGGAEALPTSQTMGGRAETLLTS

SEQ ID NO: 3456 - protein, 150 aa, Homo sapiens
MVQASGHRRSTRGSKMVSWSVIAKIQEIWCEEDERKMAREFLAEFMSTYVMMEWLTGMLQLCLFAIVDQENNPALPGTHALVIGILVVIIRVYHGMNTGYAINPSRDLPPPHLHLHCWLGQTGLQVLPLPRPIPLRFSVGPLCVEVWGVM

SEQ ID NO: 3457 - protein, 190 aa, Homo sapiens
MGPGIVLVSSHGKMLDLTMTRAAKIGLYLSEPIESSTSTTRGFYCLSQLQQHNMRQGPRTAELCTVFRRGCELLLCRVGRCFRALQAPCRPLLTVHGLHLPYLLSCPISCSWLWFPEGSRLHRLPCVLTLWWVCKWQSPGKETGEHGHGSSGGHGGFRLPPRSTCFISSGHQDCITRTMTTLRALLQLKT

SEQ ID NO: 3458 - protein, 286 aa, Homo sapiens
MRTPYTTSLTRTPHTTSLTRILYTTSLTRPPTRASPTRMPPRASPTRTPPRASPRRTPPRASPRRTPPRASLTRPPTRAPPTRMPPTAPPTRTPPTASPARTPPTESPARTPPTASPARTPPRASPTRTPPRASPRRTPSTASPTRTPPRASPRRTPPRASPTRTPPRASPKRTPPRASPRRTPPRASPTRAPPRASPKRTPPTASPTRTPPRASPTRTPPTESPARTPPRASPTRTPPTESPARTPSRASTRRTPPRASPTRTPPRASPKRTPPTASPTSCIRHR

SEQ ID NO: 3459 - protein, 1172 aa, Homo sapiens
MFGPSVEFTSVLKPVFAREKEPFSLSCLFSEDVLDAESIQWFRDGSLLRSSRRRKILYTDRQASLKVSCTYKEDEGLYTVRVPSPFGPREQSTYVLVRDAEAENPGAPGSPLNVRCLDVNRDCLILTWAPPSDTRGNPITAYTIERCQGESGEWIACHEAPGGTCRCPIRGLVEGQSYRFRVRAISRVGSSVPSKASELVVMGDHDAARRKTEIPFDLGNKITISTDAFEDTVTIPSPPTNVHASEIREAYVVLAWEEPSPRGRAPLTYSLEKSVIGSGTWEAISSESPVRSPRFAVLDLEKKKSYVFRVRAMNQYGLSDPSEPSEPIALRGPPATLPPPAQVQAFRDTQTSVSLTWDPVKDPELLGYYIYSRKVGTSEWQTVNNKPIQGTRFTVPRLRTGKEYEFCVRSVSEAGVGESSAATEPIRVKQALATPSAPYGFALLNCGKNEMVIGWKPPKRRGGGKILGYFLDQHDSEELDWHAVNQQPIPTRVCKVSDLHEGHFYEFRARAANWAGVGELSAPSSLFECKEWTMPQPGPPYDVRASEVRATSLVLQWEPPLYMGAGPVTGYHVSFQEEGSEQWKPVTPGPISGTHLRVSDLQPGKSYVFQVQAMNSAGLGQPSMPTDPVLLEDKPGAHEIEVGVDEEGFIYLAFEAPEAPDSSEFQWSKDYKGPLDPQRVKIEDKVNKSKVILKEPGLEDLGTYSVIVTDADEDISASHTLTEEELEKLKKLSHEIRNPVIKLISGWNIDILERGEVRLWLEVEKLSPAAELHLIFNNKEIFSSPNRKINFDREKGLVEVIIQNLSEEDKGSYTAQLRDGKAKNQITLTLVDDDFDKLLRKADAKRRDWKRKQGPYFERPLQWKVTEDCQVQLTCKVTNTKKETRFQWFFQRAEMPDGQYDPETGTGLLCIEELSKKDKGIYRAMVSDDRGEDDTILDLTGDALDAIFTELGRIGALSATPLKIQGTEEGIRIFSKVKYYNVEYMKTTWFHKDKRLESGDRIRTGTTLDEIWLHILDPKDSDKGKYTLEIAAGKEVRQLSTDLSGQAFEDAMAEHQRLKTLAIIEKNRAKVVRGLPDVATIMEDKTLCLTCIVSGDPTPEISWLKNDQPVTFLDRYRMEVRGTEVTITIEKVNSEDSGRYGVFVKNKYGSETGQVTISVFKHGDEPKELKSM

SEQ ID NO: 3460 - protein, 167 aa, Homo sapiens [sequence omitted]

SEQ ID NO: 3461 - protein, 221 aa, Homo sapiens
MMRWNFSPEDLSSIFRNNSTLPKITVKNVDIEFTIPTAVTIEVEPSPVQQDNPPISSEQADFSLAQPDSPSLPLESPEESESSAQQEATAQTPNPPKEVEPSPVQQEFPAEPTEPAKEVEPSATQQEASGHPLKSTKEVNPPPKQEIPAQPSEPPEKVELSPVLQQAPTQLLEPLKKVECSPVQQAVPAQSSEPSIVVEPSPVQQIAHLCLQSSLRKWNPL

SEQ ID NO: 3462 - protein, 153 aa, Homo sapiens
MSGACTSYVSAEQEVVRGFSCPRPGGEAAAVFCCGFRDHKYCCDDPHSFFPYEHSYMWWLSIGALIGLSVAAVVLLAFIVTACVLCYLFISSKPHTKLDLGLSLQTAGPVQVATNKRNQTVLTLKGLTWRTRQAHKWPGGPVVALHGALGRKK

SEQ ID NO: 3463 - protein, 928 aa, Homo sapiens
MAVRFQVADMEELTIWEQHTATLSKDPRRGFGIAISGGRDRPGGSMVVSDVVPGGPAEGRLQTGDHIVMVNGVSMENATSAFAIQILKTCTKMANITVKRPRRIHLPATKASPSSPGRQDSDEDDGPQRVEEVDQGRGYDGDSSSGSGRSWDERSRRPRPGRRGRAGSHGRRSPGGGSEANGLALVSGFKRLPRQDVQMKPVKSVLVKRRDSEEFGVKLGSQIFIKHITDSGLAARHRGLQEGDLILQINGVSSQNLSLNDTRRLIEKSEGKLSLLVLRDRGQFLVNIPPAVSDSDSSPLEDISDLASELSQAPPSHIPPPPRHAQRSPEASQTDSPVESPRLRRESSVDSRTISEPDEQRSELPRESSYDIYRVPSSQSMEDRGYSPDTRVVRFLKGKSIGLRLAGGNDVGIFVSGVQAGSPADGQGIQEGDQILQVNDVPFQNLTREEAVQFLLGPPPGEEMELVTQRKQDIFWKMVQSRVGDSFYIRTHFELEPSPPSGLGFTRGDVFHVLDTLHPGPGQSHARGGHWLAVRMGRDLREQERGIIPNQSRAEQLASLEAAQRAVGVGPGSSAGSNARAEFWRLRGLRRGAKKTTQRSREDLSALTRQGRYPPYERVVLREASFKRPVVILGPVADIAMQKLTAEMPDQFEIAETVSRTDSPSKIIKLDTVRVIAEKDKHALLDVTPSAIERLNYVQYYPIVVFFIPESRPALKALRQWLAPASRRSTRRLYAQAQKLRKHSSHLFTATIPLNGTSDTWYQELKAIIREQQTRPIWTAEDQLDGSLEDNLDLPHHGLADSSADLSCDSRVNSDYETDGEGGAYTDGEGYTDGEGGPYTDVDDEPPAPALARSSEPVQADESQSPRDRGRISAHQGAQVDSRHPQGQWRQDSMRTYEREALKKKFMRVHDAESSDEDGYDWGPATDL

SEQ ID NO: 3464 - protein, 117 aa, Homo sapiens
MQKTRQNLDKKVNRIRTRIVTPERRERLRQSGERLRQSGERLRQSGERFKKSISNAAPSKEAFKMRSLRKGKDRTVAEGEECAREMGVDIIARSESLGPISELYSDELSVLHLFSLF

SEQ ID NO: 3465 - protein, 202 aa, Homo sapiens [sequence omitted]

SEQ ID NO: 3466 - protein, 182 aa, Homo sapiens
MAPASNFSAGSDWHGVGAAGAAPGQHLASCPVAPDGSSASGPHFLLSTGKPTPSEATRGKSEQGVPAVPTSQRHVLWPLTQPMRQSSDPRAHFPGHGAQPQPEPCEGRGTRMTTWGTMALHTWALYFSLENPGKILKQVHEVLSLCSKQHSSGVGTKGSTEPRPPQPLPGPICAVQVIHACS

SEQ ID NO: 3467 - protein, 734 aa, Homo sapiens
MNQCPVHFIQHGKLVRKQSRKLRVGDIVMVKEDETFPCDLIFLSSNRGDGTCHVTTASLDGESSHKTHYAVQDTKGFHTEEDIGGLHATIECELPQPDLYKFVGRINVYSDLNDPVVRPLGSENLLLRGATLKNTEKIFGVAIYTGMETKMALNYQSKSQKRSAVEKSMNAFLIVYLCILISKALINTVLKYVWQSEPFRDEPWYNQKTESERQRNLFLKAFTDFLAFMVLFNYIIPVSMYVTVEMQKFLGSYFITWDEDMFDEETGEGPLVNTSDLNEELGQVEYIFTDKTGTLTENNMEFKECCIEGHVYVPHVICNGQVLPESSGIDMIDSSPSVNGREREELFFRALCLCHTVQVKDDDSVDGPRKSPDGGKSCVYISSSPDEVALVEGVQRLGFTYLRLKDNYMEILNRENHIERFELLEILSFDSVRRRMSVIVKSATGEIYLFCKGADSSIFPRVIEGKVDQIRARVERNAVEGLRTLCVAYKRLIQEEYEGICKLLQAAKVALQDREKKLAEAYEQIEKDLTLLGATAVEDRLQEKAADTIEALQKAGIKVWVLTGDKMETAAATCYACKLFRRNTQLLELTTKRIEEQSLHDVLFELSKTVLRHSGSLTRDNLSGLSADMQDYGLIIDGAALSLIMKPREDGSSGNYRELFLEICRSCSAVLCCRMAPLQKAQIVKLIKFSKEHPITLAIGDGANDVSMILEAHVGIGELRPCCWHILVARSPLR

SEQ ID NO: 3468 - protein, 316 aa, Homo sapiens [sequence omitted]

SEQ ID NO: 3469 - protein, 232 aa, Homo sapiens
MSEEVNYATLTFQDSAGARNNRDGNNLRKRGHPAPSPIWRHAALGLVTLCLMLLIGLVTLGMMFLQISNDINSDSEKLSQLQKTIQQQQDNLSQQLGNSNNLSMEEEFLKSQISSLLKRQEQMAIKLCQELIIHTSDHRCNPCPKMWQWYQNSCYYFTTNEEKTWANSRKDCIDKNSTLVKIDSLEEKDFLMSQPLLMFSFFWLGLSWDSSGRSWFWEDGSVPSPSLYVSNY

SEQ ID NO: 3470 - protein, 459 aa, Homo sapiens
MQIKQEGELQLQEQQALGVEAWAAGQPDIGEEPWGLSQLDSGAGDISTDATSGVHSNFSTTIPPTSWQTDLPPHHPSSACSDGTLKLNTAASTEDVKIVIKTEVQEEEVVATPVHPTDLEAHGTLFGPGQATRFFPSPAQEGAWESQGSSFPSQDPVLGLREPARPERDMGELSPAVAQEETPPGDWLFGGVRWGWNFRCKPPVGLNPRTGPEGLPYSSPDNGEAILDPSQAPRPFNEPCKYPGRTKGFGHKPGLKKHPAAPPGGRPFTCATCGKSFQLQVSLSAHQRSCGAPDGSGPGTGGGGSGSGGGGGGSGGGSARDGSALRCGECGRCFTRPAHLIRHRMLHTGERPFPCTECEKRFTERSKLIDHYRTHTGVRPFTCTVCGKSFIRKDHLRKHQRNHAAGAKTPARGQPLPTPPAPPDPFKSPASKGPLASTDLVTDWTCGLSVLGPTDGGDM

SEQ ID NO: 3471 - protein, 244 aa, Homo sapiens
MSGAIFGPLEGPSSLDAPSIHPLVCPLCHVQYERPCLLDCFHDFCAGCLRGRATDGRLTCPLCQHQTVLKGPSGLPPVDRLLQFLVDSSGDGVEAVRCANCDLECSEQAGAAGRVGEEQRVPGCTVPNACTCTQHVFRGRPGSGFSSTSLGHLGPKCEPHYTGGETEVQNKGLEPVSRQWQRLRPFDLGRAHWSPIQGGVVDLHRRGSPVCRPGPTLKGLCYPSGIEAATAQGRWGQHAVPSGL

SEQ ID NO: 3472 - protein, 136 aa, Homo sapiens
MLERNLTSMMSVEEPLPRPLTSLYIRLSILERNHMNMTYMAKSSVKIHISKVIIGFVLKRSLTNVCGKVLSQNSHLVNHQRIHTGEKSYRCHECGKAFTQGSRFINHQIVHTGENFPNVLNVARLLRMALNSGLTK

SEQ ID NO: 3473 - protein, 194 aa, Homo sapiens [sequence omitted]

SEQ ID NO: 3474 - protein, 118 aa, Homo sapiens
MVRSPPHAPSPSFLSSGRLVPDAGSSPLPCLCRFLLPPPLVADTVPGLHERGGSASDRGGELAPSSGEESSEHPEAPFSDLQRRGTLMGWALRTARQLASRNLQERSACWSRTLQKVA

SEQ ID NO: 3475 - protein, 134 aa, Homo sapiens
MGGQRPMHRWPQAHAGHCPTTLAPRQCSASAAAQCPLHVASAVPLLKAFYDLSLCFPSSQEWQERTPTSVQPVGGRQSWRPLGLVLRTAAATAPHAQSIQAGLPCEPLGPRRPLATLHFHSRQGPRWQGGPSWA

SEQ ID NO: 3476 - protein, 109 aa, Homo sapiens [sequence omitted]

SEQ ID NO: 3477 - protein, 179 aa, Homo sapiens [sequence omitted]

SEQ ID NO: 3478 - protein, 372 aa, Homo sapiens
MRAILKMGQLCGDHPLGAVTFRCVALVAVWLCGTATRSHVGKDSCGLGTELSLLGVSRCWGEGRQSSQSPSTAHPAARPWPVNPPSPFLPQEAVEKVTQHIHGLSGKKDGLVPMFINTHSGLFTHLGVFTLGARADSYYEYLLKQWIQGGKQETQLLEDYVEAIEGVRTHLLRHSEPSKLTFVGELAHGRFSAKMDHLVCFLPGTLALGVYHGLPASHMELAQELMETCYQMNRQMETGLSPEIVHFNLYPQPGRRDVEVKPADRHNLLRPETVESLFYLYRVTGDRKYQDWGWEILQSFSRFTRVPSGGYSSINNVQDPQKPEPRDKMESFFLGETLKYLFLLFSDDPNLLSLDAYVFNTEAHPLPIWTPA

SEQ ID NO: 3479 - protein, 308 aa, Homo sapiens
MHTQVCAHTYIRMHRHLCTHMQIHPQHPICATHRRRYMETDAHTGLCTHIRMHRHLCTHMQIHPQHPICATHRHRYMKTDAHTGLCTHVCMHRHLCTHMQMHPQYPICATHRHTYMETEAHTGLCTHVHMHRHLCTHMQMHPQYPICAIHRHTYMETDAHTGLCTHVHMHRHLCTHMQMHPQYPICATHRHTYMETDVHTGLCTHVHMHRHLCTHMQMHPQYPICATHRHTYMETDAHTGLCTHVHMHRHLCTHMQMHPQYRICATQTYVHGDRCTYRSMHTCTHAQAPVHTLYLLICSSPPCRLLGR

SEQ ID NO: 3480 - protein, 169 aa, Homo sapiens [sequence omitted]

SEQ ID NO: 3481 - protein, 107 aa, Homo sapiens
MAVFTQHGASYTSTLALPFLTSFHGDPFMSVWTATLFPQLHGAPRRSQLELPNPMTDPFIAAICTRVGVSIGHCQARMAGPKHVHFSFEAPVLRQCGLRPWESCGCQ

SEQ ID NO: 3482 - protein, 148 aa, Homo sapiens
MRGSCTPGPCLSWSHTGCGHTTSWSSLSGQPHNPLFPSWAPLPSCPGSCLSIRQSTRTAELWCAQHTRIPARRSEVRGAALGTGPAGEGPGRWRDSLQKSAVPSFPEGPHGFPYGTSEPSGKCGSVKEGTGIPFSSPTIEPYSGHLFR

SEQ ID NO: 3483 - protein, 113 aa, Homo sapiens
MAEGKGEAGITWQEREQDRGGGASGSSKQPDLVWTHRVRTHSLLQGQHHDIHEGCAHMTQTPPTRPHLQHWRSHFNMRFGGGKTCKPYREGGAGWWIQLHRLGNGPEAAFRLV

SEQ ID NO: 3484 - protein, 198 aa, Homo sapiens [sequence omitted]

SEQ ID NO: 3485 - protein, 206 aa, Homo sapiens [sequence omitted]

SEQ ID NO: 3486 - protein, 105 aa, Homo sapiens
MALSHPQALPRSTPHTLLLLPGYNNGNGPGTQPGRGRRGWGGWGRGQGPRATLWVPTDGLLGVHSFTQSPLSTRPKPGLGWPWRTPKLVKGGHGLDSRAKNQIQL

SEQ ID NO: 3487 - protein, 541 aa, Homo sapiens
MQREVPRGPCPEWELKAVPSQQQGICKEEPAQEPIMERPLGGAQAWGRQAGALQRSQAAPWAPAPAMIWDVPVEEFPLRCPLFAQQRVPEGGPLLDTRKNVQATEGRTKAPARLCAGENASTPSEPEKFPQVRRQRGAGAGEGEFVCGECGKAFRQSSSLTLHRRWHSREKAYKCDECGKAFTWSTNLLEHRRIHTGEKPFFCGECGKAFSCHSSLNVHQRIHTGERPYKCSACEKAFSCSSLLSMHLRVHTGEKPYRCGECGKAFNQRTHLTRHHRIHTGEKPYQCGSCGKAFTCHSSLTVHEKIHSGDKPFKCSDCEKAFNSRSRLTLHQRTHTGEKPFKCADCGKGFSCHAYLLVHRRIHSGEKPFKCNECGKAFSSHAYLIVHRRIHTGEKPFDCSQCWKAFSCHSSLIVHQRIHTGEKPYKCSECGRAFSQNHCLIKHQKIHSGEKSFKCEKCGEMFNWSSHLTEHQRLHSEGKPLAIQFNKHLLSTYYVPGSLLGAGDAGLRDVDPIDALDVAKLLCVVPPRAGRNFSLGSKPRN

SEQ ID NO: 3488 - protein, 123 aa, Homo sapiens [sequence omitted]

SEQ ID NO: 3489 - protein, 121 aa, Homo sapiens
MLELGWEALYEQRAEPRSGFEELNNENKSTLQLEQQVKELEKSGGAEEPRGSESAAAARPVPGAPVPQGAWMCGQAGWTPQEHPGLSGEAVGTGEAAGGAGEAACHSFRAAENRELNITII

SEQ ID NO: 3490 - protein, 121 aa, Homo sapiens [sequence omitted]

SEQ ID NO: 3491 - protein, 155 aa, Homo sapiens [sequence omitted]

SEQ ID NO: 3492 - protein, 102 aa, Homo sapiens [sequence omitted]

SEQ ID NO: 3493 - protein, 134 aa, Homo sapiens [sequence omitted]

SEQ ID NO: 3494 - protein, 909 aa, Homo sapiens
MLSVAVKILSDKSESNTKEFLIAVGLKGATLQHRMLPSGLSWHEQILYFLNIADEPVLGYNPPTSFTTFHVHLWSCALDYRPLYLPIRSLLTVETFSVSSSVALDKSSSTLRIILDEAALHLSDKCNTVTINLSRDYVRVMDMGLLELTITAVKSDSDGEQTEPRFELHCSSDVVHIRTCSDSCAALMNLIQYIASYGDLQTPNKADMKPGAFERRSKVDSSGRSSSRGPVLPEADQQMLRDLMSDAMEEIDMQQGTSSVKPQANGVLDEKSQIQEPCCSDLFLFPDESGNVSQESGPTYASFSHHFISDAMTGVPTENDDFCILFAPKAAMQEKEEEPVIKIMVDDAIVIRDNYFSLPVNKTDTSKAPLHFPIPVIRYVVKEVSLVWHLYGGKDFGTVPPTSPAKSYISPHSSPSHTPTRHGRNTVCGGKGRNHDFLMEIQLSKVKFQHEVYPPCKPDCDSSLSEHPVSRQVFIVQDLEIRDRLATSQMNKFLYLYCSKEMPRKAHSNMLTVKALHVCPESGRSPQECCLRVSLMPLRLNIDQDALFFLKDFFTSLSAEVELQMTPDPEVKKSPGADVTCSLPRHLSTSKEPNLVISFSGPKQPSQNDSANSVEVVNGMEEKNFSAEEASFRDQPVFFREFRFTSEVPIRLDYHGKHVSMDQGTLAGILIGLAQLNCSELKLKRLSYRHGLLGVDKLFSYAITEWLNDIKKNQLPGILGGVGPMHSLVQLVQGLKDLVWLPIEQYRKDGRIVRGFQRGAASSGTSTAMAALELTNRMVQTIQAAAETAYDMVSPGTLSIEPKKTKRFPHHRLAHQPVDLREGVAKAYSVVKEGITDTAQTIYETAAREHESRGVTGAVGEVLRQIPPAVVKPLIVATEATSNVLGGMRNQIRPDVRQDESQKWRHGDD

SEQ ID NO: 3495 - protein, 121 aa, Homo sapiens
MQPRYRTVLLASPYQIYSCYFVVKTSPLHPNPGSHWFFSSFSFFFFFLRQSLALLSRLEWCSGVISVHCNLRLQGSSGSPASASRVAGIMGARHHAQLIFVFLVEMGFHCFGQAGLELLTS

SEQ ID NO: 3496 - protein, 115 aa, Homo sapiens
MIPPQEASARRREIEDKLKQEEETLSFIRDSLEKSDQLTKNMVSILSSFESRLMKLENSIIPGLFQTQSRGTGFARPRRPLSRRPTGPFYRSLAACPSPRTRRSTSSTGWSRWAT

SEQ ID NO: 3497 - protein, 337 aa, Homo sapiens
MCRDYVLDCNILPPLLQLFSKQNRLTMTRNAVWALSNLCRGKSPPPEFAKVSPCLNVLSWLLFVSDTDVLADACWALSYLSDGPNDKIQAVIDAGVCRRLVELLMHNDYKVVSPALRAVGNIVTGDDIQTQVILNCSALQSLLHLLSSPKESIKKEACWTISNITAGNRAQIQTVIDANIFPALISILQTAEFRTRKEAAWAITNATSGGSAEQIKYLVELGCIKPLCDLLTVMDSKIVQVALNGLENILRLGEQEAKRNGTGINPYCALIEEAYGLDKIEFLQSHENQEIYQKAFDLIEHYFGTEDEDSSIAPQVDLNQQQYIFQQCEAPMEGFQL

SEQ ID NO: 3498 - protein, 121 aa, Homo sapiens
MLERGHCCLPGGAKSGLAGSSAPVHRQGRLRTVWAPQHQRVAPWHPPGPHCIWGKKLHGNVSLYLALLAHPGGHYDTSLPHCTLPALATNMPPTTTDHLGQPATSTSPTSQCLSVKIPRTK

SEQ ID NO: 3499 - protein, 512 aa, Homo sapiens
MPHAGGKFYGCKKCGKAFISFCAFRYHQRTHTKEKPYACKQCGKAYISYTSFQYHQLNHTGAKRYECKQCGKGFDLPNSIRYHEMTHTGEKPHECKQCGKTFRCASSLRIHGRTHTGEKPYECKQCGKVSRYWSGLQVHEVTHIGKKLYECKECGKSYYSSGSFLNHKRIHTREKSYECKECGKAFGNPISFQKHEGSHRKWKPYECKECGKVFSFSSSLRRHERTHTEKLCECKQHGKGFFHRSCPRHMKIDTGEILHKRKIRGKVFHSPSSFQTCERSHTREKRYKCKQCGKPFIYFNAFQRHQRSHTGENPYECKQCGKACISSTAFQCRELSHTGAKRYKCKQCGKGFNLPSSIRYHEMTHTGEKPYECKQCGRAFRSASHLRTHERTHIGEKPYECKQCGKVYRYWSGLRIHGLTHIGKKPYEFNDRGKSFYSSNFFLNHKRVHTRVKTYECKECGKAFDNPTSFQKHEGSHRKGKSYECKECGKVFSFSRSFRRYERAHTGEKPCE

SEQ ID NO: 3500 - protein, 122 aa, Homo sapiens [sequence omitted]

SEQ ID NO: 3501 - protein, 140 aa, Homo sapiens [sequence omitted]

SEQ ID NO: 3502 - protein, 366 aa, Homo sapiens [sequence omitted]

SEQ ID NO: 3503 - protein, 174 aa, Homo sapiens [sequence omitted]

SEQ ID NO: 3504 - protein, 506 aa, Homo sapiens
MKRRSVTMTDGLTADKVTRSDGCPTSTSLPRPRDSIRSCALSMDQIPDLHSPMSPISESPSSPAYSTVTRVHAAPAAPSATALPASPVARRSSEPQLCPGSAPKTHGESDKGPHTSPSHTLGKASPSPSLSSYSDPDSGHYCQLQPPVRGSREWAATETSSQQARSYGERLKELSENGAPEGDWGKTFTVPIVEVTSSFNPATFQSLLIPRDNRPLEVGLLRKVKELLAEVDARTLARHVTKVDCLVARILGVTKEMQTLMGVRWGMELLTLPHGRQLRLDLLERFHTMSIMLAVDILGCTGPAEERAALLHKTIQLAAELRGTMGNMFSFAAVMGALDMAQISRLEQTWVTLRQRHTEGAILYEKKLKPFLKSLNEGKEGPPLSNTTFPHVLPLITLLECDSAPPEGPEPWGSTEHGVEVVLAHLEAARTVAHHGGLYHTNAEVKLQGFQARPELLEVFSTEFQMRLLWGSQGASSSQARRYEKFDKVLTALSHKLEPAVRSSEL

SEQ ID NO: 3505 - protein, 143 aa, Homo sapiens
MGVSVSPLITLPAWCNVHMLSFITAMGTERQFMLSPHGALRSISTHHPALTVICLTPLALLFFLEHDNLPPAAPAQSQDVCMCRGPCTLFPQLLACLFPSHYPCLCLSISSSEVLLTSPLQVPFPLPPCGSVAPSTLQLCSFP

SEQ ID NO: 3506 - protein, 143 aa, Homo sapiens
MLCQLLTPGSCPALPCVPTPPPPAMPHTCLSPQARALSCGYPRKQPSKSFVAMVLPWGPCSCSAAPPTTRWWGLGSSPAPGRGASLSGLQGPQCANVRTPLSARWLWGWGMAPNPVMGMVWVGMAWVSTHKQLGQCVGSHSQH

SEQ ID NO: 3507 - protein, 142 aa, Homo sapiens [sequence omitted]

SEQ ID NO: 3508 - protein, 808 aa, Homo sapiens [sequence omitted]

SEQ ID NO: 3509 - protein, 286 aa, Homo sapiens [sequence omitted]

SEQ ID NO: 3510 - protein, 161 aa, Homo sapiens
MVCFNMGRITLAKKLARKALRLLKRNFPWTWFGVLFQTFLEKYWHSCTLSQPPNDPSEKLSLPMWSSLSSPRVWASRTSGCTVSRWPFRKAVYVGSPGRGCWPQLSSCRPWPTPSSALVILTSPSSWVMGLRDGGSRAFREYMFTARPHMVLLNLLRFSSS

SEQ ID NO: 3511 - protein, 169 aa, Homo sapiens [sequence omitted]

SEQ ID NO: 3512 - protein, 120 aa, Homo sapiens
MDLAPLIFSGKLIPQAPSLLMLLFPEFPSICRRLCSSAEPSTKQDVLHCEAVLPGGTVTRHFFGASLQKSQNTRPASSYHSCLLCPVLGPPSPCANTPRGLSCGRDAGSHSSRWTVLEGP

SEQ ID NO: 3513 - protein, 100 aa, Homo sapiens [sequence omitted]

SEQ ID NO: 3514 - protein, 528 aa, Homo sapiens
MDHCGALFLCLCLLTLQNATTETWEELLSYMENMQVSRGRSSVFSSRQLHQLEQMLLNTSFPGYNLTLQTPTIQSLAFKLSCDFSGLSLTSATLKRVPQAGGQHARGQHAMQFPAELTRDACKTRPRELRLICIYFSNTHFFKDENNSSLLNNYVLGAQLSHGHVNNLRDPVNISFWHNQSLEGYTLTCVFWKEGARKQPWGGWSPEGCRTEQPSHSQVLCRCNHLTYFAVLMQLSPALVPAELLAPLTYISLVGCSISIVASLITVLLHFHFRKQSDSLTRIHMNLHASVLLLNIAFLLSPAFAMSPVPGSACTALAAALHYALLSCLTWMAIEGFNLYLLLGRVYNIYIRRYVFKLGVLGWGAPALLVLLSLSVKSSVYGPCTIPVFDSWENGTGFQNMSICWVRSPVVHSVLVMGYGGLTSLFNLVVLAWALWTLRRLRERADAPSVRACHDTVTVLGLTVLLGTTWALAFFSFGVFLLPQLFLFTILNSLYGFFLFLWFCSQRCRSEAEAKAQIEAFSSSQTTQ

SEQ ID NO: 3515 - protein, 539 aa, Homo sapiens [sequence omitted]

SEQ ID NO: 3516 - protein, 142 aa, Homo sapiens
MLFFRHARKHFSQAEGSQLDEVRQAMGMLAFPPDTHISPYKDLLDPARWRMLIQQFRYDNYRLHQLGNNSVFTLTLQAGLSAIKTPYPTSRAQCGLAWGWHLWSYFNTLTLHLATLVLPPQTAPSSRVLHLRGVWMVGVGPC

SEQ ID NO: 3517 - protein, 136 aa, Homo sapiens [sequence omitted]

SEQ ID NO: 3518 - protein, 110 aa, Homo sapiens [sequence omitted]

SEQ ID NO: 3519 - protein, 126 aa, Homo sapiens [sequence omitted]

SEQ ID NO: 3520 - protein, 111 aa, Homo sapiens [sequence omitted]

SEQ ID NO: 3521 - protein, 205 aa, Homo sapiens
MAEFSQKRGKRRSDEGLGSMVDFLLANARLVLGVGGAAVLGIATLAVKRFIDRATSPRDEDDTKADSWKELSLLKATPHLQPRPPPAALSQPVLPLAPSSSAPGEAAGLRAGPCDHPSSPGGFGQTAGWRHRPGAAGLLSEQVPGTALWGIRAWGAALRRAAGGGCGPCASPGATGAGAGPVEPGAGRGHCGEGPSLLGRAQDAA

SEQ ID NO: 3522 - protein, 157 aa, Homo sapiens; identical to SEQ ID NO: 2067

SEQ ID NO: 3523 - protein, 132 aa, Homo sapiens [sequence omitted]

SEQ ID NO: 3524 - protein, 477 aa, Homo sapiens [sequence omitted]

SEQ ID NO: 3525 - protein, 128 aa, Homo sapiens
MNPWTKEVEYIVSTNTVVLANVLEGGDPTFPQLTASPHSMDSMLPSGEGGPKRTHPTVPGIPGGTRAGAGKIGRMIAEEIMEIHRQVTPSSSSVKPVVLNPGKFIPPGNILQCQETFLVFTTGWEVAT

SEQ ID NO: 3526 - protein, 421 aa, Homo sapiens
MRTQRKGDGQTGSSLPVEASMVTPSPGWSVHTGDLDGHPLPRMVSAHRRSRWSPPPQDGQCTPEISMVTPSPGWSVHTGDLDGHPLPRMVSAHRRSRWSPPPQDAQCTPEISMVTPSPGCSVHTGDLDGHPLPRMLSAHRRSRWSPPPQDAQCTPEISMVTPSPGWSVHTGDLDGHPLPRMVSAHRRSRWSPPPVPVVRVGEEVQEPQSSCSRSPGSQRLGPSQRPLGHEEGQQQPELRMASRKGPCQPLSQTWSVGIRWGPSWMPLGGWWAQPCIWTLKAKETPASQTTSAILPLLGVAGVEGSARVHGPFTTSDLSQIQQHLGSSSENPSHYRKEFLHITQSFNLTWHDIYIILISTLTPDEKGAPGVQLKPTQMNSIIKPLYKIQWPMMHFPTETHTRFTIRETMAPVWTGGAGASSS

SEQ ID NO: 3527 - protein, 589 aa, Homo sapiens
MPFKAFDTFKEKILKPGKEGVKNAVGDSLGILQRKIDGTTEEEDNIELNEEGRPVQTSRPSPPLCDCHCCGLPKRYIIAIMSGLGFCISFGIRCNLGVAIVEMVNNSTVYVDGKPEIQTAQFNWDPETVGLIHGSFFWGYIMTQIPGGFISNKFAANRVFGAAIFLTSTLNMFIPSAARVHYGCVMCVRILQGLVEGVTYPACHGMWSKWAPPLERSRLATTSFCGSYAGAVVAMPLAGVLVQYIGWSSVFYIYGMFGIIWYMFWLLQAYECPAAHPTISNEEKTYIETSIGEGANVVSLSKFSTPWKRFFTSLPVYAIIVANFCRSWTFYLLLISQPAYFEEVFGFAISKVGLLSAVPHMVMTIVVPIGGQLADYLRSRQILTTTAVRKIMNCGGFGMEATLLLVVGFSHTKGVAISFLVLAVGFSGFAISGFNVNHLDIAPRYASILMGISNGVGTLSGMVCPLIVGAMTRHKTREEWQNVFLIAALVHYSGVIFYGVFASGEKQEWADPENLSEEKCGIIDQDELAEEIELNHESFASPKKKMSYGATSQNCEVQKKEWKGQRGATLDEEELTSYQNEERNFSTIS

SEQ ID NO: 3528 - protein, 893 aa, Homo sapiens [sequence omitted]

SEQ ID NO: 3529 - protein, 329 aa, Homo sapiens
MPLGRQSHRHHRTHGQKHRRRGRGKGASQGEEGLEALAHDTPSQRVQFILGTEEDEEHVPHELFTELDEICMKEGEDAEWKETARWLKFEEDVEDGGERWSKPYVATLSLHSLFELRSCLINGTVLLDMHANSIEEISDLILDQQELSSDLNDSMGVKVREALLKKHHHQNEKKRNNLIPIVRSFAEVGKKQSDPHLMDKHGQTVSPQSVPTTNLEVKNGVNCEHSPVDLSKVDLHFMKKIPTGAEASNVLVGEVDILDRPIVAFVRLSPAVLLSGLTEVPIPTRFLFILLGPVGKGQQYHEIGRSMATIMTDEVCATFASVFHLINIY

SEQ ID NO: 3530 - protein, 130 aa, Homo sapiens [sequence omitted]

SEQ ID NO: 3531 - protein, 131 aa, Homo sapiens [sequence omitted]

SEQ ID NO: 3532 - protein, 729 aa, Homo sapiens
MSACAGTFHGAKVKGGCGQRGTYHRSHSGQTCAVVVMCKQLYWNWISTFTSGIRLEEQRAADGKTLKQQTVPQQKVGVTGPPDPQVRCPSVIEFGKYEIHTWYSSPYPQEYSRLPKLYLCEFCLKYMKSRTILQQHMKKCGWFHPPANEIYRKNNISVFEVDGNVSTIYCQNLCLLAKLFLDHKTLYYDVEPFLFYVLTQNDVKGCHLVGYFSKEKHCQQKYNVSCIMILPQYQRKGYGRFLIDFSYLLSKREGQAGSPEKPLSDLGRLSYMAYWKSVILECLYHQNDKQISIKKLSKLTGICPQDITSTLHHLRMLDFRSDQFVIIRREKLIQDHMAKLQLNLRPVDVDPECLRWTPVIVSNSVVSEEEEEEAEEGENEEPQCQERELEISVGKSVSHENKEQDSYSVESEKKPEVMAPVSSTRLSKQVLPHDSLPANSQPSRRGRWGRKNRKTQERFGDKDSKLLLEETSSAPQEQYGECGEKSEATQEQYTESEEQLVASEEQPSQDGKPDLPKRRLSEGVEPWRGQLKKSPEALKCRLTEGSERLPRRYSEGDRAVLRGFSESSEEEEEPESPRSSSPPILTKPTLKRKKPFLHRRRRVRKRKHHNSSVVTETISETTEVLDEPFEDSDSERPMPRLEPTFEIDEEEEEEDENELFPREYFRRLSSQDVLRCQSSSKRKSKDEEEDEESDDADDTPILKPVSLLRKRDVKNSPLEPDTSTPLKKK

SEQ ID NO: 3533 - protein, 117 aa, Homo sapiens [sequence omitted]

SEQ ID NO: 3534 - protein, 172 aa, Homo sapiens
MGNNTVLDVLRREGYEVEHAPAGRPIHKGKSKKTSTRPTLSTIFAPKVPTLEVPAPEAVSSGHSTLPPLVSRPGSADTPSEAEQRFRKKRRRSQRRPRLRQFSDLWVRLEESDIVPQLQVPVLDRHISTELRLPRRGHSHHSQMVASSACLSLWTPVFWVLVLAFQTETPLL

SEQ ID NO: 3535 - protein, 114 aa, Homo sapiens [sequence omitted]

SEQ ID NO: 3536 - protein, 340 aa, Homo sapiens
MFSVSLGQTILCIGRDKSSCESYGYNVCDYQCWENSVGEELYKLSIFNFLLTVAFAFLVTLPRRLLVDRFSGRFWAWLEREEFLVPKNVLDIVAGQTVTWMGLFYCPLLPLLNSVFLFLTFYIKKYTLLKNSRASSRPFRASSSTFFFQLVLLLGLLLAAVPLGYVVSSIHSSWDCGLFTNYSAPWQVVPELVALGLPPIGQRALHYLGSHAFSFPLLIMLSLVLTVCVSQTQANARAIHRLRKQLVWQVQEKWHLVEDLSRLLPEPGPSDSPGPKYPASQASRPQSFCPGCPCPGSPGHQAPRPGPSVVDAAGLRSPCPGQHGAPASARRFRFPSGAEL

SEQ ID NO: 3537 - protein, 172 aa, Homo sapiens [sequence omitted]

SEQ ID NO: 3538 - protein, 686 aa, Homo sapiens
MLVETSMIGLMLGTCIAFYVVIGDLGSNFFARLFGFQVGGTFRMFLLFAVSLCIVLPLSLQRNMMASIQSFSAMALLFYTVFMFVIVLSSLKHGLFSGQWLRRVSYVRWEGVFRCIPIFGMSFACQSQVLPTYDSLDEPSVKTMSSIFASSLNVVTTFYVMVGFFGYVSFTEATAGNVLMHFPSNLVTEMLRVGFMMSVAVGFPMMILPCRQALSTLLCEQQQKDGTFAAGGYMPPLRFKALTLSVVFGTMVGGILIPNVETILGLTGATMGSLICFICPALIYKKIHKNALSSQVVLWVGLGVLVVSTVTTLSVSEEVPEDLAEEAPGGRLGEAEGLMKVEAARLSAQDPVVAVAEDGREKPKLPKEREELEQAQIKGPVDVPGREDGKEAPEEAQLDRPGQGIAVPVGEAHRHEPPVPHDKVVVDEGQDREVPEENKPPSRHAGGKAPGVQGQMAPPLPDSEREKQEPEQGEVGKRPGQAQALEEAGDLPEDPQKVPEADGQPAVQPAKEDLGPGDRGLHPRPQAVLSEQQNGLAVGGGEKAKGGPPPGNAAGDTGQPAEDSDHGGKPPLPAEKPAPGPGLPPEPREQRDVERAGGNQAASQLEEAGRAEMLDHAVLLQVIKEQQVQQKRLLDQQEKLLAVIEEQHKEIHQQRQEDEEDKPRQVEVHQEPGAAVPRGQEAPEGS

SEQ ID NO: 3539 - protein, 116 aa, Homo sapiens
MDAHSSVELFSAGQVSASIISQRLTESLIHQYRIPHNTALDRGPTLEKSKCRSGLMTMRLDGHIPYTPPRSCQHNRDLERLVGSTARTPAWSQLHEDDSGRWIHIYMCRKDFYLSA

SEQ ID NO: 3540 - protein, 154 aa, Homo sapiens; identical to SEQ ID NO: 2378

SEQ ID NO: 3541 - protein, 196 aa, Homo sapiens [sequence omitted]

SEQ ID NO: 3542 - protein, 531 aa, Homo sapiens [sequence omitted]

SEQ ID NO: 3543 - protein, 147 aa, Homo sapiens [sequence omitted]

SEQ ID NO: 3544 - protein, 334 aa, Homo sapiens
MLALAKILLISTLFYSLLSGSHGKENQDINTTQNIAEVFKTMENKPISLESEANLNSDKENITTSNLKASHSPPLNLPNNSHGITDFSSNSSAEHSLGSLKPTSTISTSPPLIHSFVSKVPWNAPIADEDLLPISAHPNATPALSSENFTWSLVNDTVKTPDNSSITVSILSSEPTSPSVTPLIVEPSGWLTTNSDSFTGFTPYQEKTTLQPTLKFTNNSKLFPNTSDPQKENRNTGIVFGAILGAILGVSLLTLVGYLLCGKRKTDSFSHRRLYDDRNEPVLRLDNAPEPYDVSFGNSSYYNPTLNDSAMPESEENARDGIPMDDIPPLRTSV

SEQ ID NO: 3545 - protein, 909 aa, Homo sapiens [sequence omitted]

SEQ ID NO: 3546 - protein, 276 aa, Homo sapiens
MLRDSEAEVTEEDPRLRAQQLHHRVLTLQCQLRDQGAAHQASLDEATRLQEELQAKLEELQKKQHEAKLAVTPLKAKIASLVRKCRERNRLITHLLQELHRHGLGNLLLSELAQNMLNDVALAEYTATFLAPGVPETSHHLDVKSEMTAALRAQTYLLNPEMDSVLQSSLSSESWPIPEPEWPAQTAQLDSLKLPLSLVSTLDPGTCLAAVTVEPGLPAQRLQEKGGMPCPALQVDNVPAPSELLSPARILAFHQELRQSICSNSQVHKSPLELEM

SEQ ID NO: 3547 - protein, 474 aa, Homo sapiens
MAAAALRAPTQGCVTFEDIAIYFSQDEWGLLDEAQRLLYLEVMLENFALVASLGCGHGTEDEETPSDQNVSVGVSQSKAGSSTQKTQSCEMCVPVLKDILHLADLPGQKPYLVGECTNHHQHQKHHSAKKSLKRDMDRASYVKCCLFCMSLKPFRKWEVGKDLPAMLRLLRSLVFPGGKKPGTITECGEDIRSQKSHYKSGECGKASRHQHTPVYHPRVYTGKKLYECSKCGKAFRGKYSLVQHQRVHTGERPWECNECGKFFSQTSHLNDHRRIHTGERPYECSECGKLFRQNSSLVDHQKIHTGARPYECSQCGKSFSQKATLVKHQRVHTGERPYKCGECGNSFSQSAILNQHRRIHTGAKPYECGQCGKSLSQKATLIKHQRVHTGERPYKCGDCGKSFSQSSILIQHRRIHTGARPYECGQCGKSFSQKSGLIQHQVVHTGERPYECNKCGNSFSQCSSLIHHQKCHNT

SEQ ID NO: 3548 - protein, 372 aa, Homo sapiens; identical to SEQ ID NO: 3478

SEQ ID NO: 3549 - protein, 108 aa, Homo sapiens
MAGTGLGGPWPIWGPWWASRKGRCWSGSRVARQQVGVTPVHAAGVPGLMQAVPEGDRSSRVGWPASPAPPQAGASETEGAPAPPHLPSRAWPGPPSSTPGSVRSGAGA

SEQ ID NO: 3550 - protein, 405 aa, Homo sapiens
MRSAELQEALGSGNLLNYCQNKSQQALLQSEKMLWQFLKVTLEQDSRMKFLKLLGYSKDELQKKVATWLKSDVGLGESPQPKGNDLNSDRQQAFCSQASKHTTKEASASSAFFDELVPQNMTPWEIPITKDIDGLLSQALLLGELGPAVELCLKEERFADAIILAQAGGTDLLKQTQERYLAKKKTKISSLLACVVQKNWKDVVCTCSLKNWREALALLLTYSGTEKFPELCDMLGTRMEQEGSRALTSEARLCYVCSGSVERLVECWAKCHQALSPMALQDLMEKVMVLNRSLEQLRGPHGVSPGPATTYRVTQYANLLAAQGSLATAMSFLPRDCAQPPVQQLRDRLFHAQGSAVLGQQSPPFPFPRIVVGATLHSKETSSYRLGSQPSHQVRPRLFIHLFIQ

SEQ ID NO: 3551 - protein, 761 aa, Homo sapiens
MLGLRPPLLALVGLLSLGCVLSQECTKFKVSSCRECIESGPGCTWCQKLNSIRCDTRPQLLMRGCAADDIMDPTSLAETQEDHNGGQKQLSPQKVTLYLRPGQAAAFNVTFRRAKGYPIDLYYLMDLSYSMLDDLRNVKKLGGDLLRALNEITESGRIGFGSFVDKTVLPFVNTHPDKLRNPCPNKEKECQPPFAFRHVLKLTNNSNQFQTEVGKQLISGNLDAPEGGLDAMMQVAACPEEIGWRNVTRLLVFATDDGFHFAGDGKLGAILTPNDGRCHLEDNLYKRSNEFDYPSVGQLAHKLAENNIQPIFAVTSRMVKTYEKLTEIIPKSAVGELSEDSSNVVHLIKNAYNKLSSRVFLDHNALPDTLKVTYDSFCSNGVTHRNQPRGDCDGVQINVPITFQVKVTATECIQEQSFVIRALGFTDIVTVQVLPQCECRCRDQSRDRSLCHGKGFLECGICRCDTGYIGKNCECQTQGRSSQELEGSCRKDNNSIICSGLGDCVCGQCLCHTSDVPGKLIYGQYCECDTINCERYNGQVCGGPGRGLCFCGKCRCHPGFEGSACQCERTTEGCLNPRRVECSGRGRCRCNVCECHSGYQLPLCQECPGCPSPCGKYISCAECLKFEKGPFGKNCSAACPGLQLSNNPVKGRTCKERDSEGCWVAYTLEQQDGMDRYLIYVDESRECVAGPNIAAIVGGTVAGIVLIGILLLVIWKALIHLSDLREYRRFEKEKLKSQWNNDNPLFKSATTTVMNPKFAES

SEQ ID NO: 3552 - protein, 175 aa, Homo sapiens [sequence omitted]

SEQ ID NO: 3553 - protein, 176 aa, Homo sapiens
MGGYLKTRPWTLQHFYLCLMPAATWLVLLLLLWLSLGVKTAAPNPRTFAVLGRITAARGEVATVMNSAMWHQTATQTTVSSATPVTHIQARFHLQQSWMRWLAEANPLPALQAKAGMWPRWFLRSLTILRSCILSISGQRCLHAPSSFVSLMFLATCYSSLSYFSRFHRERFSCPW

SEQ ID NO: 3554 - protein, 237 aa, Homo sapiens [sequence omitted]

SEQ ID NO: 3555 - protein, 129 aa, Homo sapiens
MYMYVLCISHTYVYITHICMYITHICVYQTHVCVYHTHMYVYHTYMYVYHTHICMYITHICMYITHIYVCISHIYMYVYHAYMCMYITYMCVYHTYMHVYHTYMCVYHIYIYMHDPYLKVGYFITKYQY

SEQ ID NO: 3556 - protein, 112 aa, Homo sapiens [sequence omitted]

SEQ ID NO: 3557 - protein, 334 aa, Homo sapiens
MEVLIASLEKSVLGCWKGLLLPSSEEPGPAQEASRLQELLQDCGWKYPDRTLLKIMLSGAGALTPQDIQALAYGLCPTQPERAQELLNEAVGRLQGLTVPSNSHLVLVLDKDLQKLPWESMPSLQALPVTRLPSFRFLLSYSIIKEYGASPVLSQGVDPRSTFYVLNPHNNLSSTEEQFRANFSSEAGWRGVVGEVPRPEQVQEALTKHDLYIYAGHGAGARFLDGQAVLRLSCRAVALLFGCSSAALAVHGNLEGAGIVLKYIMAGCPLFLGNLWDVTDRDIDRYTETLLQGWLGAGPGAPLLYYVNQARQAPRLKYLIGAAPIAYGLPVSLR

SEQ ID NO: 3558 - protein, 113 aa, Homo sapiens
MKVTSLFKFQIQGPRCSSKDAGVGPCARTKSMFQIKSRPASRSNIQDQVQIQIQRRGPQPGTNSSPRSKSKVQVNLQGPDHGPKSKIHMEVQVPCPRPKNDSDPFHDQGSGLR

SEQ ID NO: 3559 - protein, 189 aa, Homo sapiens [sequence omitted]

SEQ ID NO: 3560 - protein, 1362 aa, Homo sapiens [sequence omitted]

SEQ ID NO: 3561 - protein, 150 aa, Homo sapiens
MRQLAHSGTCTLGCVHTRACAPTLKHRVTQLIHTHTFSHTQTQGHTTQIQTHTLPHTFKHRVTQLINTHTDTHAPTHSPSWPEPLLPGHKGADERCRGPCRLLLAFGCPQGSNLAAEWFVGGVLKIQTQKWELLVGQHQDLRWGGFGSRV

SEQ ID NO: 3562 - protein, 142 aa, Homo sapiens [sequence omitted]

SEQ ID NO: 3563 - protein, 354 aa, Homo sapiens
MAGQVARVVHITEDGQVIATSQSGAHVGSVVPGPILPEQLADGATQVVVVGGSMEGHGMDESLSPGGAVIQQVTKQEILNLSEAGVAPPEASSALDALLCAVTELGEVEGRAGLEEQGRPGAKDVLIQLPGQEVSHVAADPEAPEIQMFPQAQESPAAVEVLTQVVHPSAAMASQERAQVAFKKMVQGVLQFAVCDTAAAGQLVKDGVTQVVVSEEGAVHMVAGEGAQIIMQEAQGEHMDLVESDGEISQIIVTEELVQAMVQESSGGFSKGTTHYILTELPPGVQDEPGLYSHTVLETADSQELLQAGATLGTEAGAPSRAEQLASVVIYTQEGSSAAAAIQSQRESSELQEA

SEQ ID NO: 3564 - protein, 166 aa, Homo sapiens
MCLCRPLLPQRAQYQDKLARQRYEDQLKQQQLLNVENLRKQEESVQKQEAMRRATVEREMELRHKNEMLRVETEARARAKAERENADIIREQIRLKASEHRQTVLESIRTAGTLFGEGFRAFVTDRDKVTATVNIFIKQGWQVAERQHVGASWSPRSCPCRLCTAL

SEQ ID NO: 3565 - protein, 313 aa, Homo sapiens
MAAIGRGRSLKNLRVREPSDNLREILQNVARLQGVSNMRKLGHLNNFTKLLCDIGHSEEKLGFHYEDIIICLRLALLNEAKEVRAAGLRALRYLIQDSSILQKVLKLKVDYLIARCIDIQQSNEVERTQALRLVRKMITVNASLFPSSVTNSLIAVGNDGLQERDRMVRACIAIICELALQNPEVVALRGGLNTILKNVIDCQLSRINEALITTILHLLNHPKTRQYVRADVELERILAPYTDFHYRHSPDTAEGQLKEDREARFLASKMGIIATFRSWAGIINLCKPGNSGIQSLIGVLCIPNMEIRVGKSY

SEQ ID NO: 3566 - protein, 294 aa, Homo sapiens [sequence omitted]

SEQ ID NO: 3567 - protein, 682 aa, Homo sapiens
MESLTLEDVAVDFTWEEWQFLSPAQKDLYRDVMLENYSNLVAVGYQASKPDALSKLERGEETCTTEDEIYSRICSDSGGASGGAYAEIRKIDDPLQHHLQNQSIQKSVKQCHEQNMFGNIVNQNKGHFLLKQDCDMFDLHEKPLKSNLSFENQKRSSGLKNSAEFNRDGKSLFHANHKQFYTEMKFPAIAKPINKSQFIKQQRTHNIENAHVCSECGKAFLKLSQFIDHQRVHTGEKPHVCSMCGKAFSRKSRLMDHQRTHTELKHYECTECDKTFLKKSQLNIHQKTHMGGKPYTCSQCGKAFIKKCRLIYHQRTHTGEKPHGCSVCGKAFSTKFSLTTHQKTHTGEKPYICSECGKGFIEKRRLIAHHRTHTGEKPFICNKCGKGFTLKNSLITHQQTHTGEKLYTCSECGKGFSMKHCLMVHQRTHTGEKPYKCNECGKGFALKSPLIRHQRTHTGEKPYVCTECRKGFTMKSDLIVHQRTHTAEKPYICNDCGKGFTVKSRLIVHQRTHTGEKPYVCGECGKGFPAKIRLMGHQRTHTGEKPYICNECGKGFTMKSTLSIHQQTHTGEKPYKCNECDKTFRKKTCLIQHQRFHTGKTSFACTECGKFSLRKNDLITHQRIHTGEKPYKCSDCGKAFTTKSGLNVHQRKHTGERPYGCSDCGKAFAHLSILVKHKRIHR

SEQ ID NO: 3568 - protein, 114 aa, Homo sapiens
MGQEGAFPRISGSTVFSLDQNGITVYFDWSVSGFRLSLGWASGSGRKDLGSGVSLGRGGAGPPAGSPAPSVGLPSTTGFAEAPAPPSRRARPQHWSLSSVFRATGPWAATTGAS

SEQ ID NO: 3569 - protein, 325 aa, Homo sapiens [sequence omitted]

SEQ ID NO: 3570 - protein, 168 aa, Homo sapiens [sequence omitted]

SEQ ID NO: 3571 - protein, 105 aa, Homo sapiens
MISFDSMSHIWVTLMQEVGSHGLEQLHPSGFAGYSLLPGCFHRLALSICSFSRCTVQAVGGSTILGFGRWWSSSYSSTRQCCIRDSVWGLLPHTSLLHCPSTGTP

SEQ ID NO: 3572 - protein, 174 aa, Homo sapiens
MKGSLMATISIVLELKAALVTRHPICPNLFTPAFAFPLVPQGRNWCCMRRCSCQSNRRSREPAIASDSITGAGLSVIAWDGKYSFCFWRKYFTHEDQDQLIRTGRNKGTMCGSGSFFFFLREGLALSPMLKCHCANTSLYSLNLLGSSNPPASDSQVAGTIVACHHAWLIFNFL

SEQ ID NO: 3573 - protein, 575 aa, Homo sapiens
MRILVIGLSRELPLGPADAMELADHLVKRAAAVQADDVEVLKVGRTQLIDAVLNLCTYHHPENIQLPPGYQPPNLAISTLYWKAWPLLLVVAAFNPENIGLAAWEEYPTLKMLMEMVMTNNYSYPPCTLTDEETRTEMLNRELQTAQREKQEILAFEGHLAAASTKQTITESSSLLLSQLTSLDPQGPPRRPPPHILDQVKSLNQSLRLGHLLCRSRNPDFLLHIIQRQASSQSMPWLADLVQSSEGSLDVLPVQCLCEFLLHDAVDDAASGEEDDEGESKEQKAKKRQRQQKQRQLLGRLQDLLLGPKADEQTTCEVLDYFLRRLGSSQVASRVLAMKGLSLVLSEGSLRDGEEKEPPMEEDVGDTDVLQGYQWLLRDLPRLPLFDSVRSTTALALQQAIHMETDPHTISAYLIYLSQHTPVEEQAQHSDLALDVARLVVERSTIMSHLFSKLSPSAASDAVLSALLSIFSRYVRRMRQSKEGEEVYSWSESQDQVFLRWSSGETATMHILVVHAMVILLTLGPPRGEPPQAPGGAASCQVGHSPDHTQRLPHPCLASGREAPQPFNPVSWLLS

SEQ ID NO: 3574 - protein, 295 aa, Homo sapiens
MPSPRRSMEGRPLGVSASSSSSSPGSPAHGGGGGGSRFEFQSLLSSRATAVDPTCARLRASESPVHRRGSFPLAAAGPSQSPAPPLPEEDRMDLNPSFLGIALRSLLAIDLWLSKKLGVCAGESSSWGSVRPLMKLLEISGHGIPWLLGTLYCLCRSDSWAGREVLMNLLFALLLDLLLVALIKGLVRRRRPAHNQMDMFVTLSVDKYSFPSGHATRAALMSRFILNHLVLAIPLRVLVVLWAFVLGLSRVMLGRHNVTDVAFGFFLGYMQYSIVDYCWLSPHNAPVLFLLWSQR

SEQ ID NO: 3575 - protein, 125 aa, Homo sapiens
MLLEPGRGCCALAILLAIVDIQSGETGNYTVTGLKQRQHLEFSHNEGTLSSGFLQEKVWVMLVTSLVALQGMSKRAVSTPSNEGAIIFLPPWLFSRRRRLERMSRGREKCYSSPGYPQESSNQFH

SEQ ID NO: 3576 - protein, 596 aa, Homo sapiens [sequence omitted]

SEQ ID NO: 3577 - protein, 139 aa, Homo sapiens
MPEGPELHLASQFVNEACRALVFGGCVEKSSVSRNPEVPFESSAYRISASARGKELRLILSPLPGAQPQQEPLAPRGAATPCPPALLHGPAWPPARPMFRGHPPVRPLGPWGKVAAGPRALCLAGVPAVQGECATKPSG

SEQ ID NO: 3578 - protein, 117 aa, Homo sapiens
MPSRQLEDPGAGTPSPVRLHALAGFQQRALCHALTFPSLQRLVYSMCSLCQEENEDMVPDALQQNPGAFRLAPALPARPHRGLSTFPGAEHCLRASPKTTLSGGFFVAVIERVEMPT

SEQ ID NO: 3579 - protein, 140 aa, Homo sapiens [sequence omitted]

SEQ ID NO: 3580 - protein, 322 aa, Homo sapiens
MKWKALFTAAILQAQLPITEAQSFGLLDPKLCYLLDGILFIYGVILTALFLRVKFSRSADAPAYQQGQNQLYNELNLGRREEYDVLDKRRGRDPEMGGKPQRRKNPQEGLYNVSRGDLTFDLGKLEEGLEEGSRGRAGGRAGGGLQRKGWRKGWRRAPEEGLEEGLEEGSGGRAGGRAGGGLRRKGWRKGWRRAPEEGLEEGLEEGSGGRAGGRAGGGLRRRAGGRAGGGLRRKGWRKGWRRAPEEGLEEGLEEGSGGRAGGRAGGGLRRKGWRKGWRRAPEEGLEEGFGGRAGGRAGGGLQRKAVAPHSVVFVCPDLPFLD

SEQ ID NO: 3581 - protein, 544 aa, Homo sapiens
MEEITRTIHIGPSRLGHPCFYHQKDIKLENLIIKQGEQIMLNSVEEIDGEIMVSCAVARNHQTHSFNLPLSQEGEFYECEDERIYTLKEIVEWKIPKNRTRTVNLTDFSNKWDSTNPFPKDFYGTLILKPVYEIQGVMKFRKDIIRILPSLDVEVKDITDSYDANWFLQLLSTEDLFEMTSKEFPIVTEVIEAPEGNHLPQSILQPGKTIVIHKKYQASRILASEIRSNFPKRHFLIPTSYKGKFKRRPREFPTAYDLEIAKSEKEPLHVVATKAFHSPHDKLSSVSVGDQFLVHQSETTEVLCEGIKKVVNVLACEKILKKSYEAALLPLYMEGGFVEVIHDKKQYPISELCKQFRLPFNVKVSVRDLSIEEDVLAATPGLQLEEDITDSYLLISDFANPTECWEIPVGRLNMTVQLVSNFSRDAEPFLVRTLVEEITEEQYYMMRRYESSASHPPPRPPKHPSVEETKLTLLTLAEERTVDLPKSPKRHHVDITKKLHPNQAGLDSKVLIGSQNDLVDEEKERSNRGATAVAETFKNEKHQK

SEQ ID NO: 3582 - protein, 903 aa, Homo sapiens
MNKAPQSTGPPPAPSPGLPQPAFPPGQTAPVVFSTPQATQMNTPSQPRQGRSTYVVPTQQYPVQPGAPGFYPGASPTEFGTYAGAYYPAQGVQQFPTGVAPAPVLMNQPPQIAPKRERKTIRIRDPNQGGKDITEEIMSGARTASTPTPPQTGGGLEPQANGETPQVAVIVRPDDRSQGAIIADRPGLPGPEHSPSESQPSSPSPTPSPSPVLEPGSEPNLAVLSIPGDTMTTIQMSVEESTPISRETGEPYRLSPEPTPLAEPILEVEVTLSKPVPESEFSSSPLQAPTPLASHTVEIHEPNGMVPSEDLEPEVESSPELAPPPACPSESPVPIAPTAQPEELLNGAPSPPAVDLSPVSEPEEQAKEVTASVAPPTIPSATPATAPSATSPAQEEEMEEEEEEEEGEAGEAGEAESEKGGEELLPPESTPIPANLSQNLEAAAATQVAVSVPKRRRKIKELNKKEAVGDLLDAFKEANPAVPEVENQPPAGSNPGPESEGSGVPPRPEEADETWDSKEDKIHNAENIQPGEQKYEYKSDQWKPLNLEEKKRYDREFLLGFQFIFASMQKPEGLPHISDVVLDKANKTPLRPLDPTRLQGINCGPDFTPSFANLGRTTLSTRGPPRGGPGGELPRGPAGLGPRRSQQGPRKEPRKIIATVLMTEDIKLNKAEKAWKPSSKRTAADKDRGEEDADGSKTQDLFRRVRSILNKLTPQMFQQLMKQVTQLAIDTEERLKGVIDLIFEKAISEPNFSVAYANMCRCLMALKVPTTEKPTVTVNFRKLLLNRCQKEFEKDKDDDEVFEKKQKEMDEAATAEERGRLKEELEEARDIARRRSLGNIKFIGELFKLKMLTEAIMHDCVVKLLENHDEESLECLCRLLTTIGKDLDFEKAKPRMDQYFNQM

SEQ ID NO: 3583 - protein, 164 aa, Homo sapiens [sequence omitted]

SEQ ID NO: 3584 - protein, 133 aa, Homo sapiens [sequence omitted]

SEQ ID NO: 3585 - protein, 129 aa, Homo sapiens [sequence omitted]

SEQ ID NO: 3586 - protein, 425 aa, Homo sapiens
MLKHQCSCGDNSRHPEHAGRIQSIWSRLQERGLRSQCECLRGRKASLEELQSVHSERHVLLYGTNPLSRLKLDNGKLAGLLAQRMFVMLPCGGVGVDTDTIWNELHSSNAARWAAGSVTDLAFKVASRELKNGFAVVRPPGHHADHSTAMGFCFFNSVAIACRQLQQQSKASKILIVDWDVHHGNGTQQTFYQDPSVLYISLHRHDDGNFFPGSGAVDEVGAGSGEGFNVNVAWAGGLDPPMGDPEYLAAFRIVVMPIAREFSPDLVLVSAGFDAAEGHPAPLGGYHVSAKCFGYMTQQLMNLAGGAVVLALEGGHDLTAICDASEACVAALLGNRVDPLSEEGWKQKPNLNAIRSLEAVIRVHSKYWGCMQRLASCPDSWVPRVPGADKEEVEAVTALASLSVGILAEDRPSEQLVEEEEPMNL

SEQ ID NO: 3587 - protein, 130 aa, Homo sapiens [sequence omitted]

SEQ ID NO: 3588 - protein, 110 aa, Homo sapiens
MASAHLDRILLVSCPLPESQLMQDPSQSSETKQTTVTTSSLMAHNTLIVLLYKSAYVYKSANVHLSPMLLCVYLPPSSLVSFLRAGTGFYKSLPPPPSMTEVFAHNRIAT

SEQ ID NO: 3589 - protein, 263 aa, Homo sapiens
MLGTMALAACQFMEEPGMEVQVRESKHPYNNNTNFEDKVHIPGAIYLSIKFDSQCNTEEGCDELAMSSSSDFQQDRHSFSGSQQKWKDFELPGDTLYYRFTSDMSNTEWGYRFTVTAGHLGRFQTGFEILKQMLSEERVVPHLPLAKIWEWLVGVACRQTGHQRLKAIHLLLRIVRCCGHSDLCDLALLKPLWQLFTHMEYGLFEDVTQPGILLPLHRALTELFFVTENRAQVRPEVWAGSPVPPCAFAPSATQGRSCCLIRA

SEQ ID NO: 3590 - protein, 1090 aa, Homo sapiens
MEQPKGVDWTVIILTCQYKDSVQVFQRELEVRQKREQIPAGTLLLAVEDPEKRVGSGGATLNALLVAAEHLSARAGFTWICVGVSLWIRGCHPPGRLPEASVHRAFPLLQVVTSDVLHSAWILILHMGRDFPFDDCGRAFTCLPVENPEAPVEALVCNLDCLLDIMTYRLGPGSPPGVWVCSTDMLLSVPANPGISWDSFRGARVIALPGSPAYAQNHGVYLTDPQGLVLDIYYQGTEAEIQRCVRPDGRVPLVSGVVFFSVETAERLLATHVSPPLDACTYLGLDSGARPVQLSLFFDILHCMAENVTREDFLVGRPPELGQGDADVAGYLQSARAQLWRELRDQPLTMAYVSSGSYSYMTSSASEFLLSLTLPGAPGAQIVHSQVEEQQLLAAGSSVVSCLLEGPVQLGPGSVLQHCHLQGPIHIGAGCLVTGLDTAHSKALHGRELRDLVLQGHHTRLHGSPGHAFTLVGRLDSWERQGAGTYLNVPWSEFFKRTGVRAWDLWDPETLPAEYCLPSARLFPVLHPSRELGPQDLLWMLDHQEDGGEALRAWRASWRLSWEQLQPCLDRAATLASRRDLFFRQALHKARHVLEARQDLSLRPLIWAAVREGCPGPLLATLDQVAAGAGDPGVAARALACVADVLGCMAEGRGGLRSGPAANPEWMRPFSYLECGDLAAGVEALAQERDKWLSRPALLVRAARHYEGAGQILIRQAVMSAQHFVSTEQVELPGPGQWVVAECPARVDFSGGWSDTPPLAYELGGAVLGLAVRVDGRRPIGARARRIPEPELWLAVGPRQDEMTVKIVCRCLADLRDYCQPHAPGALLKAAFICAGIVHVHSELQLSTSSILAGTALAALQRAAGRVVGTEALIHAVLHLEQVLTTGGGWQDQVGGLMPGIKVGRSRAQLPLKVEVEEVTVPEGFVQKLNDHLLLVYTGKTRLARNLLQDVLRSWYARLPAVVQNAHSLVRQTEECAEGFRQGSLPLLGQCLTSYWEQKKLMAPGCEPLTVRRMMDVLAPHVHGQSLAGAGGGGFLYLLTKEPQQKEALEAVLAKTEGLGNYSIHLVEVDTQGLSLKLLGTEASTCCPFP

SEQ ID NO: 3591 - protein, 146 aa, Homo sapiens
MFFNVVHTYFFFFFFTLLSRLECSGVISAYCNLCLPGSSNSPVSASRVAGITGARHHAWLVFIFLVEVRFQHIGQAGLELLTSGDPPTSASQSAWITGVSHHAQLKHTFLCCRFSSKDSKFYNSRNHIPSTYHSLAYMGRQLFMDE

SEQ ID NO: 3592 - protein, 113 aa, Homo sapiens
MQKADGSWRMTVDYCKPNQVVTAIAAAIPDVVSLLEQINTSPDTWYAAIDLANALFSIPVHKVHQKQFAFSFLFYLRGISTLWLCVIMLFGENLIAFHFHEIPHWSITLMTLC

SEQ ID NO: 3593 - protein, 141 aa, Homo sapiens
MASQSGSSLGLLAWFLLLQPWLEEARAGRVGAQGGVALLFPSALPSGPGGQDPGASGWEPPPVGAPGSPAAPQSRGNAVRPASVLLPSACGQRTSRITGGLPAPDRKWPWQVSLQTSNRHICGGSLIARHWVLTAAHCISG

SEQ ID NO: 3594 - protein, 334 aa, Homo sapiens
MSDPQTEELKVKFYRDNQGHLKGDRLCDHWKREAVDLAFMHLDEDDTGNCTLQVEVAKYQRNGKYEASGRKCANHRKAPSLRQKRPRRSPSKRRDTSELSSSNTFHPVDFEDGQRRPSRRVKFGPTRRLIVFDRHPAGEPVSWRNAGAAAHCIQTFDGLIPSPKAGVQWCDLSSLQPLPPSSSDSLTSASQVPGTADVCHHTWLIFFFFYRVGVSPCCPGWPQTAELKQSAHLSLQKCWDSRWEPSRLAIFKKSLALSPRLECSGAISAHCKLCFPASRHSPASASRVAGTAGARHQTRLNICIFGRDGVSLCWPGWSRSATSALWEAQGGKIT

SEQ ID NO: 3595 - protein, 190 aa, Homo sapiens
MRVISIKNYHPKIRIITQMLQYHNKAHLLNIPSWNWKEGDDAICLAELKLGFIAQSCLAQGLSTMLANLFSMRSFIKIEEDTWQKYYLEGVSNEMYTEYLSSAFVGLSFPTVCELCFVKLKLLMIAIEYKSANRESRILINPGNHLKIQEGTLGFFIASDAKEVKRPPQLCLPLAAQKRCFQSDKLDIFI

SEQ ID NO: 3596 - protein, 398 aa, Homo sapiens
MFSESRCSSSTQTQGRRPRKNKDAPKKIPAAYGGPENVQIEDSHTSQAICLQDAPSGQQLAGLPRSQQQRHLPFFLEKKGESSRKHRYPQSMWEPEGKELQLDQEERAPWIEIFLGNSTPSTQGQGKGAMGTQKEVIGMEAEVTGVLLVAEGQRTTEGTHKKEAEWSHVQRLLMPSPRGAVEGAVSGSRQGSGGSSILGEPWVLQGHATKEDSTVENPQVQTEVTLVARREEQAEVSLQDEIKSLRLGLRKAEEQAQRQEQLLREQEGELQALREQLSRCQEERAELQAQLEQKQQEAERRDAMYQEELGGQRDLVQAMKRRVLELIQEKDRLWQRLQHLSSMAPECCVACSKIFGRFSRRYPCRLCGGLLCHACSMDYKKRDRCCPPCAQGREAQVT

SEQ ID NO: 3597 - protein, 477 aa, Homo sapiens [sequence omitted]

SEQ ID NO: 3598 - protein, 122 aa, Homo sapiens [sequence omitted]

SEQ ID NO: 3599 - protein, 171 aa, Homo sapiens [sequence omitted]

SEQ ID NO: 3600 - protein, 173 aa, Homo sapiens
MLGVRARPASCGGRGGSVKLALARASSHPPLPSGESVYPPPACLRHLIGCRSCGTGPLLLARVSHERNHCAGRGGGGEAGVGTVLPEAERRSVWPRAPAQRGRKRALEAGAGCRPRLLDGGGRGSAPGSHRLKGETSPTCYRHSWGWGRSGGRSGWFVGGRRLFSKNRRELQS

SEQ ID NO: 3601 - protein, 176 aa, Homo sapiens
MESGSVSQAGVQWRDPPAHCILHLSSSSDSPASASRVAVISGTCHHAQLIFVFLVETGFCYVGQAGLRLLTSSDPPTSASLSAGIAGLSHRARPFCLFLCVFETVSHSVTQNGMQWCDHSSLQSRPPGLKRSSPLSLLSSWDYRQASPHLANYFYFFIRGKASLCCPGWSQTPELK

SEQ ID NO: 3602 - protein, 122 aa, Homo sapiens [sequence omitted]

SEQ ID NO: 3603 - protein, 445 aa, Homo sapiens
MTGSSFSLAHLLIISGLLCYSAGCLALPSLDQKKRGGHKACCLLTPPPPPLFPPPFFRGGRSPLLSPDMKNLMLELETSQSPCMQGSLGSPGPPGPQGPPGLPGKTGPKGEKGELGRPGRKGRPGPPGVPGMPGPIGWPGPEGPRGEKGDLGMMGLPGSRGPMGSKGYPGSRGEKGSRGEKGDLGPKGEKGFPGFPGMLGQKGEMGPKGEPGIAGHRGPTGRPGKRGKQGQKGDSGVMGPPGKPGPSGQPGRPGPPGPPPAGQLIMGPKGERGFPGPPGRCLCGPTMNVNNPSYGESVYGPSSPRVPVIFVVNNQEELERLNTQNAIAFRRDQRSLYFKDSLGWLPIQLTPFYPVDYTADQHGTCGDGLLQPGEECDDGNSDVGDDCIRCHRAYCGDGHRHEGVEDCDGSDFGYLTCETYLPGSYGDLQCTQYCYIDSTPCRYFT

SEQ ID NO: 3604 - protein, 150 aa, Homo sapiens [sequence omitted]

SEQ ID NO: 3605 - protein, 221 aa, Homo sapiens [sequence omitted]

SEQ ID NO: 3606 - protein, 103 aa, Homo sapiens [sequence omitted]

SEQ ID NO: 3607 - protein, 224 aa, Homo sapiens
MRTAKDVNRDLYRMKSRHLLDMDEQSKAWTIYRPEDSGRRAKSASIIYQHNPINMICQNGPNSWISIANSEAIQIGHGNIITRQTVSREDGSAGPRHLPSMAPGDSSTWGTLVDPWGPQDIHMERSILRRVQLGHSNEMRLHGVPSEGPAHIPPGSPPVFQCSGKQAAEERGAESQRKTLTSRSAGRDQWGRPTAGSVEQKDASQTAQQHERSLCHCCRPRSFV

SEQ ID NO: 3608 - protein, 591 aa, Homo sapiens
MPIHDHDSGVEDEDFSPRPIPSPHPVSQKISKIQPSVPELSLVLDGNFIESNPLPTPLEMVNNENPPLINHLEHLKPLQPQLYDEKHSPEVEAGEPSLRGIPNQLNQDKPALLRHCKVRQPPAYKKGNPHTRNSIKPSSHNGPFHDIFEKLQTVSAGNVQNEEYPIRPSTLNSRQSSLAPQSQPHDFVFSPHNSGRPMELQIPTPPLPSYCSTNVCRCCQHHSHIQYSPLNSWQGANTVGSIQDVQSEALQKHSLFHPSGCPALYCNAFCSSSSPIALRPQGDMGSCSPHSNIEPSPVARPPSHMDLCNPQPCTVCMHTPKTESDNGMMGLSPDAYRFLTEQDRQLRLLQAQIQRLLEAQSLMPCSPKTTAVEDTVQAGRQMELVSVEAQSSPGLHMRKGVSIAVSTGASLFWNAAGEDQEPDSQMKQDDTKISSEDMNFSVDINNEVTSLPGSASSLKAVDIPSFEESNIAVEEEFNQPLSVSNSSLVVRKEPDVPVFFPSGQLAESVSMCLQTGPTGGASNNSETSEEPKIEHVMQPLLHQPSDNQKIYQDLLGQVNHLLNSSSRETEQPSTKAVIISHECTRTQNVYH

SEQ ID NO: 3609 - protein, 157 aa, Homo sapiens
MRADVPGSCLGERPSVWVTSRLHTVSLRLFLFSHHSILMSYDHVELTFNDMKNVPEAFKGTKKGTVYLTPYRVIFLSKGKDAMQSFMMPFYLMKDCEIKQPVFGANYIKGTVKAEAGGGWEGSASYKLTFTAGGAIEFGQRMLQVASQGIQAPKIRG

SEQ ID NO: 3610 - protein, 189 aa, Homo sapiens [sequence omitted]

SEQ ID NO: 3611 - protein, 160 aa, Homo sapiens [sequence omitted]

SEQ ID NO: 3612 - protein, 105 aa, Homo sapiens
MQTLGISLSQLAPPAGRKFPLSSQFFLLKNEGLYARFSSWPVVPREGQEGTLDNSHMHLTDEETETQSRHINTSFDLHKSTWRRGVGCLCLFKFFFVKKMKIGIL

SEQ ID NO: 3613 - protein, 427 aa, Homo sapiens
MWTRAWCVYGRRGQKSPTVSLWSFLIQLYPPFLPLPSLEDHKLVFLQQGPLLLVAMSRTSQSAAQLRGELLAVHAQIVSTLTRASVARIFAHKQNYDLRRLLAGSERTLDRLLDSMEQDPGALLLGAVRCVPLARPLRDALGALLRRCTAPGLALSVLAVGGRLITAAQERNVLAECRLDPADLQLLLDWVGAPAFAAGEAWAPVCLPRFNPDGFFYAYVARLDAMPVCLLLLGTQREAFHAMAACRRLVEDGMHALGAMRALGEAASFSNASSASAPAYSVQAVGAPGLRHFLYKPLDIPDHHRQLPQFTSPELEAPYSREEERQRLSDLYHRLHARLHSTSRPLRLIYHVAEKETLLAWVTSKFELYTCLSPLVTKAGAILVVTKLLRWVKKEEDRLFIRYPPKYSTPPATSTDQAAHNGLFTGL

SEQ ID NO: 3614 - protein, 112 aa, Homo sapiens
MSNDRRWAILSGNFQTPPPGRKECLVTSLRGERCLSSPLPVCPGRDVHTLRYREDSSGEKPQASLSAQGIGGPQPAPSSEQHTAFKGLYCCSYPAEALHQASPCKSVSPQRR

SEQ ID NO: 3615 - protein, 159 aa, Homo sapiens
MATVDPAGLALHPACPRVWGPSDQHRPPQEGSHLPARRRGLARNQSCQHPDLGPPASRTEKEMSAVAAPGCAALLQPPQQTSVQSFKGMSLSVEAGLCGEPAGKLLGEGGGQREASLVGKKGWEWRRHRGRTLSEEDQGARPFSPGSCALRGDREGGIG

SEQ ID NO: 3616 - protein, 190 aa, Homo sapiens
MKGTPSSLDTLMWIYHFHSSTEVALQPPLLSSLELSVAAAHEYLEQRFRELKSLEPPEPKMQGMLPAPKPTLGLVLREATASLVSFGTTLLEISALWLQQEARRLDGSAGPAPDGRDPGAALSRVAQAAGQGVRQAGAAVGASARLLVQGAWLCLCGRGLQGSASFLRQSQQQLGLGIPGEPVSSGHGVS

SEQ ID NO: 3617 - protein, 303 aa, Homo sapiens
MYMYMCMCVYVHIYTCIYVYTHTYIYTYTCMYVCIYSHTYIHTHVYVCVHIHICIHMYMCVYTHIYACTCVCVCVHTHTYTCICVCVHTHIYIHMCVCVYTRIYTYTCVCVCTHAYIHTHVCVCVHTHIYIHMYVCVYTRIYTYTCVCVCTHAYIHTHVYVCVHTHIYIHMCVCVYTRIYTYTCMCVCVHTHIYIHMYVCVCTHAYIHTHVYVCVYTRIYTYTCMCVCVYTRIYTYTYVCVCTHAYIHTQVYVCVCTHAYIHTHVCVCVYTYTYMYTLWCRGTIIAHCTLELRGLSDPAASAS

SEQ ID NO: 3618 - protein, 152 aa, Homo sapiens [sequence omitted]

SEQ ID NO: 3619 - protein, 180 aa, Homo sapiens
MLEGVSNEFDHFGISLPLKICLHLGWDEGLVEGKVVRLGQGIGKSICSSCQLFEEAPTQMSTVPSGLPLPILMHLCLLPVCMAHLCPASPCYFGATPGSGKFCRLITYSHSSPQLAASLRHRGREVGKDLPYPGLCPLTFHPSFFPPVEGCVSSLPGKLLSPQTIFFQILWLYSKSSLVL

SEQ ID NO: 3620 - protein, 649 aa, Homo sapiens
MWLFFGITGLLTAALSGHPSPAPPDQLNTSSAESELWEPGERLPVRLTNGSSSCSGTVEVRLEASWEPACGAEAASQLAPPTPELPPPPAAGNTSVAANATLAGAPALLCSGAEWRLCEVVEHACRSDGRRARVTCAENRALRLVDGGGACAGRVEMLEHGEWGSVCDDTWDLEDAHVVCRQLGCGWAVQALPGLHFTPGRGPIHRDQVNCSGAEAYLWDCPGLPGQHYCGHKEDAGAVCSEHQSWRLTGGADRCEGQVEVHFRGVWNTVCDSEWYPSEAKVLCQSLGCGTAVERPKGLPHSLSGRMYYSCNGEELTLSNCSWRFNNSNLCSQSLAARVLCSASRSLHNLSTPEVPASVQTVTIESSVTVKIENKESRELMLLIPSIVLGILLLGSLIFIAFILLRIKGKYALPVMVNHQHLPTTIPAGSNSYQPVPITIPKEVFMLPIQVQAPPPEDSDSGSDSDYEHYDFSAQPPVALTTFYNSQRHRVTDEEVQQSRFQMPPLEEGLEELHASHIPTANPGHCITDPPSLGPQYHPRSNSESSTSSGEDYCNSPKSKLPPWNPQVFSSERSSFLEQPPNLELAGTQPAFSAGPPADDSSSTSSGEWYQNFQPPPQPPSEEQFGCPGSPSPQPDSTDNDDYDDISAA

SEQ ID NO: 3621 - protein, 108 aa, Homo sapiens
MLISNCWDTSRGKFLCGFGGLITHGPHQDAGLERTLTVTLPGFMKFPRLRSSSGQKHTVRGGFAFFTVLSQVRPQICALQILHKEPRGSPHAQHWARFPAEETMAGRA

SEQ ID NO: 3622 - protein, 541 aa, Homo sapiens [sequence omitted]

SEQ ID NO: 3623 - protein, 147 aa, Homo sapiens
MKCYHVWCLLRTTLLCIKKSIITWSVTLRLSFVFEQHDVEINKIISTTASKTETPIVSKSLSSSLDDTEVKKVMEECKRLQGEVQRLREENKQFKEEDGLRMRKTVQSNSPISALAPTGKEEGLSTRLLALVVLFFIVGVIIGKIAL

SEQ ID NO: 3624 - protein, 135 aa, Homo sapiens [sequence omitted]

SEQ ID NO: 3625 - protein, 105 aa, Homo sapiens
MTGSVYNKTQTFDKQGFHAGTPPPFSLPSVLGSTGPLASGAAPGYAPPPFLHILPAHQQPHSQLLHHHLPQDAQSGSGQRSQPSSLQPKSQASKPAYGNSPYWTN

SEQ ID NO: 3626 - protein, 103 aa, Homo sapiens [sequence omitted]

SEQ ID NO: 3627 - protein, 103 aa, Homo sapiens [sequence omitted]

SEQ ID NO: 3628 - protein, 800 aa, Homo sapiens
MAGELADKKDRDASPSKEERKRSRTPDRERDRDRDRKSSPSKDRKRHRSRDRRRGGSRSRSRSRSKSAERERRHKERERDKERDRNKKDRDRGKDFKSRKDRDSKKDEEDEHGDKKPKAQPLSLEELLAKKKAEEEAEAKPKFLSKAEREAEALKRRQQEVEERQRMLEEERKKRKQFQDLGRKMLEDPQERERRERRERMERETNGNEDEEGRQKIREEKDKSKELHAIKERYLGGIKKRRRTRHLNDRKFVFEWDASEDTSIDYNPLYKERHQVQLLGRGFIAGIDLKQQKREQSRFYGDLMEKRRTLEEKEQEEARLRKLRKKEAKQRWDDRHWSQKKLDEMTDRDWRIFREDYSITTKGGKIPNPIRSWKDSSLPPHILEVIDKCGYKEPTPIQRQAIPIGLQNRDIIGVAETGSGKTAAFLIPLLVWITTLPKIDRIEESDQGPYAIILAPTRELAQQIEEETIKFGKPLGIRTVAVIGGISREDQGFRLRMGCEIVIATPGRLIDVLENRYLVLSRCTYVVLDEADRMIDMGFEPDVQKILEHMPVSNQKPDTDEAEDPEKMLANFESGKHKYRQTVMFTATMPPAVERLARSYLRRPAVVYIGSAGKPHERVEQKVFLMSESEKRKKLLAILEQGFDPPIIIFVNQKKGCDVLAKSLEKMGYNACTLHGGKGQEQREFALSNLKAGAKDILVATDVAGRGIDIQDVSMVVNYDMAKNIEDYIHRIGRTGRAGKSGVAITFLTKEDSAVFYELKQAILESPVSSCPPELANHPDAQHKPGTILTKKRREETIFA

SEQ ID NO: 3629 - protein, 287 aa, Homo sapiens [sequence omitted]

SEQ ID NO: 3630 - protein, 154 aa, Homo sapiens [sequence omitted]

SEQ ID NO: 3631 - protein, 134 aa, Homo sapiens
MYCGSPWPLGQSSRLQDCLQRPCLPAARESSSAIHLSLICHTPQPWPSALAVSSHTSQGPGSVEKPQKAHAAPCRPATAASGFPWERHPGRAGQGSRSPLGSCQRVNRSKTCLWLIFLLIEVIQSQMKYHLNFP

SEQ ID NO: 3632 - protein, 108 aa, Homo sapiens [sequence omitted]

SEQ ID NO: 3633 - protein, 102 aa, Homo sapiens [sequence omitted]

SEQ ID NO: 3634 - protein, 254 aa, Homo sapiens
MNRSSGTPGRPHPGAPRVAASLFLGTFFISSGLILSVAGFFYLKRSSKLPRACYRRNKAPALQPGEAAAMIPPPQSSGNSSCRIPLWGFPSLGQSQGALWVCPQTGLPGSGSRPPLPGSPGDPPTRQGQGRIWLVPPALDLSWIWPAPPARPPLIPVTSMLFPVPETWGLQERRTHHDRADPQYLLLLEVQLHPRTDAAGLRQALLSSHRFSGAGSGGPKSQPVRKPRYVRRERPLDRATDPAAFPGEARISNV

SEQ ID NO: 3635 - protein, 118 aa, Homo sapiens [sequence omitted]

SEQ ID NO: 3636 - protein, 501 aa, Homo sapiens [sequence omitted]

SEQ ID NO: 3637 - protein, 212 aa, Homo sapiens [sequence omitted]

SEQ ID NO: 3638 - protein, 125 aa, Homo sapiens [sequence omitted]

SEQ ID NO: 3639 - protein, 137 aa, Homo sapiens
MCATSQPLVPNSPQALLSLCLCLYRFLCPAYFPFLTSPAIHLFISIHLFISIHLFIKYLWGASMMCQSYWPVGLISDTALVTVLVGRALCIPHRPAGPCFAVATYNAQGPLSVTPVLLFSTLVLVHHFPWRSYVNRD

SEQ ID NO: 3640 - protein, 224 aa, Homo sapiens
MENQTKPPDPRPDAPPEYNSHFLPGPPGTAVPPPTGYPGGLPMGYYSPQQPSTFPLYQPVGGIHPVRYQPGKYPMPNQSVPITWMPGPTPMANCPPGLEYLVQLEVQCPPGVTIGFVAEHWNLCRAVYSIQNEKKENVMRVRGPCSTYGCGSDSVFEVKSLDGISNIGSIIRKWNGLLSAMADADHFDIHFPLDLDVKMKAMIFGACFLIDFMYFERSPPQRSR

SEQ ID NO: 3641 - protein, 116 aa, Homo sapiens [sequence omitted]

SEQ ID NO: 3642 - protein, 161 aa, Homo sapiens
MCLSSGHIRNEPRPQSWPPPQGWVLRRPPQPLSLDLPAEQTRTSHSPATARSCSWSSTPGWRERRHPGQPASTQALTVEAHVFLGSILKAVLSTTALTRIDLSEPACQYRPAQDWPQGHIGEGGDQALAAAHVGKSMARQEVGPVSLATATVGAGPGAPQP

SEQ ID NO: 3643 - protein, 386 aa, Homo sapiens
MYRNGISTTPQGDMNSFSQAAAHGHRNVFRKLLAQPEKEKSDILSLEEILAEGTDLAETAPPPLCASRNSKAKLRALREAMYHSAEHGYVDVTIDIRSIGVPWTLHTWLESLRIAFQQHRRPLIQCLLKEFKTIQEEEYTEELVTQGLPLMFEILKASKNEVISQQLCVIFTHCYGPYPIPKLTEIKRKQTSRLDPHFLNNKEMSDVTFLVEGRPFYAHKVLLFTASPRFKALLSSKPTNDGTCIEIGYVKYSIFQLVMQYLYYGGPESLLIKNNEIMELLSAAKFFQLEALQRHCEIICAKSINTDNCVDIYNHAKFLGVTELSAYCEGYFLKNMMVLIENEAFKQLLYDKNGEGTGQDVLQDLQRTLAIRIQSIHLSSSKGSVV

SEQ ID NO: 3644 - protein, 121 aa, Homo sapiens
MGPQFLSFFLFLPSFLFSFLFFLSFLFFSSFFSFFYFLSSFPLFSFFLSFSLSFLFLTESYFVAQAGVQWRDLGSLQPPPSGFKRFSCLSLSSTWGYRCMAQRPANFLCFSGDGVSPCWPG

SEQ ID NO: 3645 - protein, 133 aa, Homo sapiens
MSPPSGPGPPHSSAWHWPPPPPAPPCMPAAPWQTPPWALGWTRRDAGSEAPEQTQPMCQPSDSQAGLSIIKQCTVTHRAPPGTTRAKGLRLHVGSTIIMSLGNRMRPLPCLGLPGPWGPHLSPALPTTQGHRQ

SEQ ID NO: 3646 - protein, 115 aa, Homo sapiens
MPCSCSHKSRRAWGHTGHGSVVSISVSQLLAQQPAGRRPCMRPDTGRKLHSQFCPVQKRPGRGQIAPAVPPYPQGTALSSRLLNGPMKDAVTFATFLKGSGQGDTSGLCFQGRLM

SEQ ID NO: 3647 - protein, 386 aa, Homo sapiens [sequence omitted]

SEQ ID NO: 3648 - protein, 157 aa, Homo sapiens [sequence omitted]

SEQ ID NO: 3649 - protein, 368 aa, Homo sapiens
MHPSTHPSIHACIHLSIHASIHPPMHPSTHPCTHPFIHPCIHPSTHVSIHPSIHPCIHASIHPSIHPSVHPSMYPFIHSYIHPFIHPWIHASSIRLCMNACMHPSIHPFICSSIHPSMHPPIYPFIYPSMHPLIHPCIHASIYPSMHPSIHPFIHASIHAYIHPCIHQSIHACIHPSIYPSIHASIHSSMYPCIHPSIHPSIYARMHPSIHSSFHPSTYPCIHPFIYACMHPSIHPSMHACMHPSIHPYMHAFIHPSVNASIHPCIHLSICATIHPSMYPFIHLCNHPSIHLFIHPCIHPSIHPSIHVSIYPTMHLSIHPCIHPSIPPCIHPSIHESIHHPSIHPSIRPSMHASIHPSIHLLNKSVRS

SEQ ID NO: 3650 - protein, 195 aa, Homo sapiens [sequence omitted]

SEQ ID NO: 3651 - protein, 136 aa, Homo sapiens [sequence omitted]

SEQ ID NO: 3652 - protein, 410 aa, Homo sapiens
MAAMETETAPLTLESLPTDPLLLILSFLDYRDLINRRLSQLSSHDPLWRRHCKKYWLISEEEKTQKNQCWKSLFIDTYSDVGRYIDHYAAIKKAWDDLKKYLEPRCPRMVLSLKEGAREEDLDAVEAQIGCKLPDDYRCSYRIHNGQKLVVPGLLGSMALSNHYRSEDLLDVDTAAGGFQQRQGLKYCLPLTFCIHTGLSQYIAVEAAEGRNKNEVFYQCPDQMARNPAAIDMFIIGATFTDWFTSYVKNVVSGGFPIIRDQIFRYVHDPECVATTGDITVSVSTSFLPELSSVHPPHYFFTYRIRIEMSKDALPEKACQLDSRYWRITNAKGDVEEVQGPGVVGEFPIISPGRVYEYTSCTTFSTTSGYMEGYYTFHFLYFKDKIFNVAIPRFHMACPTFRVSIARLVS

SEQ ID NO: 3653 - protein, 869 aa, Homo sapiens
MGKVYRADRKSVQRIKARDIVPGDIVEVAVGDKVPADIRILAIKSTTLRVDQSILTGESVSVIKHTEPVPDPRAVNQDKKNMLFSGTNIAAGKALGIVATTGVGTEIGKIRDQMAATEQDKTPLQQKLDEFGEQLSKVISLICVAVWLINIGHFNDPVHGGSWFRGAIYYFKIAVALAVAAIPEGLPAVITTCLALGTRRMAKKNAIVRSLPSVETLGCTSVICSDKTGTLTTNQMSVCKMFIIDKVDGDICLLNEFSITGSTYAPEGEVLKNDKPVRPGQYDGLVELATICALCNDSSLDFNEAKGVYEKVGEATETALTTLVEKMNVFNTDVRSLSKVERANACNSVIRQLMKKEFTLEFSRDRKSMSVYCSPAKSSRAAVGNKMFVKGAPEGVIDRCNYVRVGTTRVPLTGPVKEKIMAVIKEWGTGRDTLRCLALATRDTPPKREEMVLDDSARFLEYETDLTFVGVVGMLDPPRKEVTGSIQLCRDAGIRVIMITGDNKGTAIAICRRIGIFGENEEVADRAYTGREFDDLPLAEQREACRRACCFARVEPSHKSKIVEYLQSYDEITAMTGDGVNDAPALKKAEIGIAMGSGTAVAKTASEMVLADDNFSTIVAAVEEGRAIYNNMKQFIRYLISSNVGEVVCIFLTAALGLPEALIPVQLLWVNLVTDGLPATALGFNPPDLDIMDRPPRSPKEPLISGWLFFRYMAIGGYVGAATVGAAAWWFLYAEDGPHVNYSQLTHFMQCTEDNTHFEGIDCEVFEAPEPMTMALSVLVTIEMCNALNSLSENQSLLRMPPWVNIWLLGSICLSMSLHFLILYVDPLPMIFKLRALDLTQWLMVLKISLPVIGLDEILKFVARNYLEG

SEQ ID NO: 3654 - protein, 205 aa, Homo sapiens
MREPLIPPCKAASLSEQEQVRGECGMMTAQGILGPRGKSKLPVLPDPRLICRYMCSCREIPGVISTPVPHSAGPQVTRFHSPSPPHISELSQTLHAPFQGSWPRPCHALSGPRAMVPNQLHPGTPCPAHVPHSCTMPAGTCPLFTGAPAAAEAGLNPGPALRAPTSCSSSTWPKPFMTVCLLPTSSMLTSPGTGGCIRARILEPA

SEQ ID NO: 3655 - protein, 130 aa, Homo sapiens [sequence omitted]

SEQ ID NO: 3656 - protein, 213 aa, Homo sapiens
MDTERVGDGKQHRRKQSQRLRWPCCLALVPDRHPSQLSSCTLCLLAAASQWESWAHFSKWHTEASTGTHLGKAKAEGLGCTVKNTPQLSICEPSHFGPSFVHSPHLLVDHDHRAGAATGRGQAGPSRASSVSPTFCPPTTSHHPVCAKGTDPVLVLQEEEQDLDGEKGPSSEGPEEEDGEGFSFKYSPGKLRGNQYKKMMTKEELEEEQRTEE

SEQ ID NO: 3657 - protein, 116 aa, Homo sapiens [sequence omitted]

SEQ ID NO: 3658 - protein, 138 aa, Homo sapiens
MKYLSYLLYPLCVGGAVYSLLNIKYKSWYSWLINSFVNGVYAFGFLFMLPQLFVNYKLKSVAHLPWKAFTYKAFNTFIDDVFAFIITMPTSHRLACFRDDVVFLVYLYQRWLYPVDKRRVNEFGESYEEKATRAPHTD

SEQ ID NO: 3659 - protein, 173 aa, Homo sapiens [sequence omitted]

SEQ ID NO: 3660 - protein, 235 aa, Homo sapiens
MDAQDCQAAASPEPPGPPARSCVAAWWDMVDRNLRHTVPSCRGEDAKGKDCCWYEAALRDGNPIIVYLHGSAEHRAASHRLKLVKVLSDGGFHVLSVDYRGFGDSTGKPTEEGLTTDAICVYEWTKARSGITPVCLWGHSLGTGVATNAAKVLEEKGCPVDAIVLEAPFTNMWVASINYPLLKSLALSSRLECSGVISAHCKLRFPGSRHSPASASRVAGTTGARHHAWLIFLCF

SEQ ID NO: 3661 - protein, 310 aa, Homo sapiens
MEKCTKSSSTMQVEPSFLQAENLILRPQMQHPTTENTAKRGQVMPALATTVMPVPYSLEHLTQFHGDPANCSEFLTQVTTYLTALQISNPANDAQIKLFFDYLSQQLESCGIISGPDKSTLLKQYENLILEFQQSFGKPTKQEINPLMNAKFDKGDNSSQQDPATFHLLAQNLICNETNQSGQFEKALADPNQDEESVTDMMDNLPDLITQCIQLDKKHSDRPELLQSETQLPLLASLIQHQALFSPTDPPPKKGPIQLREGQLPLTPAKRARQQETQLCLYCSQSGHFTRDCLAKRSRAPATTNNTAHQ

SEQ ID NO: 3662 - protein, 187 aa, Homo sapiens [sequence omitted]

SEQ ID NO: 3663 - protein, 573 aa, Homo sapiens
MSGELAVCRVTEGASCMSELAVWRVTEGASCMSGEPAVCRVTEGAGCMSELAVCRVTEGASCMSGELAVWRVTEGASCMSGELAVCRVTEGPGCMSGLLAVCRVTEGAGCMSGELAVCRVTEGASCMSGELAVCRVTEGAGCMSGLLAVCRVTEGAGCMSGELAVCRVTEGASCMSGELPVWRVTEGAGRMSGELAVCGVTEGAGCMSGELAVCRVTEGAGCMSGELAVCRVTEGAGCMSGELTVCRVTEGAGCMSGELAVWRVTEGAGCMSGELAVCRVTEGAGCMSGELAVWRVTEGAGCMSGELAVCRVTEGASCMSGELPVWRVTEGASCMSGELAVCRVTEGAGCMSGELAVCRVTEGAGCMSGELAVCRVTEGAGCMSGELAVCRVTEGAGCMSGELAVCRVTEGAGCMSGELAVCTVTEGASCMSGELAVCRVTEGARCMSGEPAVWRVTEGAGCMSGELAVWRVTEGAGCMSELAVWRVTEGAGCMSGELAVCTVTEGASCMSGELAVCRVTEGPCCVSGELAVCRVTEGPCCISGECIRSVLICLIPDHVSTQDTCVCVKGVRS

SEQ ID NO: 3664 - protein, 327 aa, Homo sapiens
MDEQCRFDFGSGYQTCLAFRTFEPCKQLWCSHPDNPYFCKTKKGPPLDGTECAPGKWCFKGHCIWKSPEQTYGQDGGWSSWTKFGSCSRSCGGGVRSRSRSCNNPSPAYGGRLCLGPMFEYQVCNSEECPGTYEDFRAQQCAKRNSYYVHQNAKHSWVPYEPDDDAQKCELICQSADTGDVVFMNQVVHDGTRCSYRDPYSVCARGECVPVGCDKEVGSMKADDKCGVCGGDNSHCRTVKGTLGKASKQAGALKLVQIPAGARHIQIEALEKSPHRIGECWGAGRGQQGPRPCPLTWGSWETRGQDSSTSGIVLTGVMGRDPLFILF

SEQ ID NO: 3665 - protein, 117 aa, Homo sapiens
MKMDKTCSKTKNKSKHALRKKQLKRQKRDYIHSLKLLNVLEEYITDEQKEEEEEEGEEEELIRIFQEQQKKWQQYRSVRRERLKEMKLLRDQFVKALEDFEDLCDRVFSDEDSELDN

SEQ ID NO: 3666 - protein, 634 aa, Homo sapiens
MGLPLPSKVIMHFMSISVLGCWHGAKDEEAPSKQCVSVGVSQVTTLKPALSTQKAQPCETCSSLLKDILHLAEHDGTHPKRTAKLYLHQKEHLREKLTRSDEGRPSFVNDSVHLAKRNLTCMQGGKDFTGDSDLQQQALHSGWKPHRDTHGVEAFQSGQNNYSCTQCGKDFCHQHTLFEHQKIHTEERPYECSECGKLFRYNSDLIKHQRNHTGERPYKCSECGKAFSLKYNVVQHQKIHTGERPYECSECGKAFLRKSHLLQHQRIHTRPRPYVCSECGKAFLTQAHLVGHQKIHTGERPYGCNECGKYFMYSSALIRHQKVHTGERPFYCCECGKFFMDSCTLIIHQRVHTGEKPYECNECGKFFRYRSTLIRHQKVHTGEKPYECSECGKFFMDTSTLIIHQRVHTGEKPYECNKCGKFFRYCFTLNRHQRVHSGERPYECSECGKFFVDSCTLKSHQRVHTGERPFECSICGKSFRCRSTLDTHQRIHTGERPYECSECGKFFRHNSNHIRHRRNHFGEGSFECTECGRVFSQNSHLIRHQKVHTRERTYKCSKCGKFFMDSSTLISHERVHTGEKPYECSECGKVFRYNSSLIKHRRIHTGERPYQCSECGRVFNQNSHLIQHQKVHTR

SEQ ID NO: 3667 - protein, 202 aa, Homo sapiens
MKKGPSGYGFNLHSDKSKPGQFIRSVDPDSPAEASGLRAQDRIVEVNGVCMEGKQHGDVVSAIRAGGDETKLLVVDRETDEFFKKCRVIPSQEHLNGPLPVPFTNGEIQKENSREALAEAALESPRPALVRSASSDTSEELNSQDSPPKQDSTAPSSTSSSDPILDFNISLAMAKERAHQKRSSKRAPQMDWSKKNELFSNL

SEQ ID NO: 3668 - protein, 107 aa, Homo sapiens [sequence omitted]

SEQ ID NO: 3669 - protein, 445 aa, Homo sapiens [sequence omitted]

SEQ ID NO: 3670 - protein, 492 aa, Homo sapiens [sequence omitted]

SEQ ID NO: 3671 - protein, 475 aa, Homo sapiens [sequence omitted]

SEQ ID NO: 3672 - protein, 125 aa, Homo sapiens
MSHSRGRGTGIFVHQFPSATSCCCSCALIPQHFWLVGKAGRKRHTDMGGWEFTLWEGQRERRQTLRARAVHRDPSGQQLFIKHLLPALGQILETQGEQDPSLSLSSWLVGRWPLTRSSAHMVRSV

SEQ ID NO: 3673 - protein, 143 aa, Homo sapiens
MDELHKLVDEGSQMAGGLPVIQQQADEGQKAVPQRPLVLAAEHVRLQQLQQAQHVQEAAQVVLLPELLEVEVGAAVQERRDHGQVPEQQQRVRHRQLPAGHAGIRPSVLQRPGVAGVRKERDEAVDESVQLADAAAGSPFAVQ

SEQ ID NO: 3674 - protein, 205 aa, Homo sapiens [sequence omitted]

SEQ ID NO: 3675 - protein, 489 aa, Homo sapiens
MSRVPGGYLALTECFEIMTVDFNNLQELKSLATKKPDKIGIPVIKEGILDAIMVWFVLQLDDEHSLSTSPSEETCWEQAVYPVQDLADYWIKPGDHVMMEVSCQDCYLRIQSISVLGLECEMDVAKSFTQNKDLLSLGNEAELCSALANLQTSKPDAVEQTCILESTEIALLNNIPYHEGFKMAMSKVLSSLTPEKLYQTMDTHCQNEMSSGTGQSNTVQNILEPFYVLDVSEGFSVLPVIAGTLGQVKPYSSVEKDQHRIALDLISEANHFPKETLEFWLRHVEDESAMLQRPKSDKLWSIIILDVIEPSGLIQQEIMEKAAISRCLLQSGGKIFPQYVLMFGLLVESQTLLEENAVQGTERTLGLNIAPFINQFQVPIRVFLDLSSLPCIPLSKPVELLRLDLMTPYLNTSNREVKVYVCKSGRLTAIPFWYHMYLDEEIRLDTSSEASHWKQAAVVLDNPIQVEMGEELVLSIQHHKSNVSITVKQ

SEQ ID NO: 3676 - protein, 101 aa, Homo sapiens [sequence omitted]

SEQ ID NO: 3677 - protein, 104 aa, Homo sapiens
MLPPGDTTMIPLSWKLRLPPGHFRLHLPLSQQVKKGVTVLAGLIEPYYQDDISLLLNNEGKEEYEWNTGDPLGCLLVLPCPMIKVNGKLQQPNSGRNTNSPDPS

SEQ ID NO: 3678 - protein, 673 aa, Homo sapiens
MAWLSQRQLARSCLDLNTISQSPGWAQTQLAEVTIACKVNHQGGSVQLPESDITVHVPQGHVAVGEFQEVSLRAFLDPPHMLNHDLSCTVSPLLEIMLGNLNTMEALLLEMKIGAEVRKDPFSQVMTEMVCLHSLGKEGPFKVLSNCYIYKDTIQVKLIDLSQVMYLVVAAQAKALPSPAATIWDYIHKTTSIGIYGPKYIHPSFTVVLTVCGHNYMPGQLTISDIKKGGKNISPVVFQLWGKQSFLLDKPQDLSISIFSCDPDFEVKTEGERKEIKQKQLEAGEVVHQQFLFSLVEHREMHLFDFCVQVEPPNGEPVAQFSITTPDPTPNLKRLSNLPGYLQKKEEIKSAPLSPKILVKYPTFQDKTLNFSNYGVTLKAVLRQSKIDYFLEYFKGDTIALLGEGKVKAIGQSKVKEWYVGVLRGKIGLVHCKNVKVISKEQVMFMSDSVFTTRNLLEQIVLPLKKLTYIYSVVLTLVSEKVYDWKVLADVLGYSHLSLEDFDQIQADKESEKVSYVIKKLKEDCHTERNTRKFLYELIVALLKMDCQELVARLIQEAAVLTSAVKLGKGWRELAEKLVRLTKQQMEAYEIPHRGNTGDVAVEMMWKPAYDFLYTWSAHYGNNYRDVLQDLQSALDRMKNPVTKHWRELTGVLILVNSLEVLRVTAFSTSEEV

SEQ ID NO: 3679 - protein, 124 aa, Homo sapiens
MTQNSSSLGDRIITPYTPPRSQPMNKHLFVSLFTLFQTTELDFANKKSCFLCLPLRADGFPEMPHSPAQTERMQKLAKDPPHARSEDVPDHLFFVDTAGLREIVCFCGVLSLRTSEGLMRKETA

SEQ ID NO: 3680 - protein, 206 aa, Homo sapiens
MNKCKEINEEEAGVRRGVFYMSRYHAKVLLGAIASAGQPASPLREVSLTHCPLLLGPSRSHIQGLGHYLINEWVVRMSKQGLTQRSGVTQPQKLRVSIGIEGPRNVFFVDVSLLQRTTPASRPRNVGKGKAWLVLVEMEMLVTVEECPPSDSQWGGALGPCHCPRTSGKSARGPQPFPARRPGRRLVLTSMRFLDGTASLLSKPFL

SEQ ID NO: 3681 - protein, 709 aa, Homo sapiens
MIASKQRQFTEVFRIMSSTFSQSRFLYAAVVTDSPENDIPMEITTAEPQVSEAVYDCVICGQSGPSSEDRPTGLVVLLQASSVLGQCRDNVEPKKLPISEEEQIYPWDTCAAVHDVRLSLLQRYFKDSSCLLAVSIGWEGGVYVQTCGHTLHIDCHKSYMESLRNDQVLQGFSVDKGEFTCPLCRQFANSVLPCYPGSNVENNPWQRPSNKSIQDLIKEVEELQGRPGAFPSETNLSKEMESVMKDIKNTTQKKYRDYSKTPGSPDNDFLFMYSVARTNLELELIHRGGNLCSGGASTAGKRSCLNQLFHVLALHMRLYSIDSEYNPWRKLTQLEEMNPQLGYEEQQPEVPILYHDVTSLLLIQILMMPQPLRKDHFTCIVKVLFTLLYTQALAALSVKCSEEDRSAWKHAGALKKSTCDAEKSYEVLLSFVISELFKGKLYHEEGTQECAMVNPIAWSPESMEKCLQDFCLPFLRITSLLQHHLFGEDLPSCQEEEEFSVLASCLGLLPTFYQTEHPFISASCLDWPVPAFDIITQWCFEIKSFTERHAEQGKALLIQESKWKLPHLLQLPENYNTIFQYYHRKTCSVCTKVPKDPAVCLVCGTFVCLKGLCCKQQSYCECVLHSQNCGAGTGIFLLINASVIIIIRGHRFCLWGSVYLDAHGEEDRDLRRGKPLYICKERYKVLEQQWISHTFDHINKRWGPHYNGL

SEQ ID NO: 3682 - protein, 194 aa, Homo sapiens
MGKLRPSRGRGFADVSQQIRVRNRPSWACRRGGPLGTLLANAGPSTVPVTPTAGSCQPSPLSPGGSDPPPPPRAHVSPQEAPLGQVPGAEWLPPTRGLLCKDVSSSPGPSFHLGGPGLPGHAGPCGPRARPAQGLAGRGGNVGEGSESPLGTLPCSVPASQQLLRGRSHLQGSLAALGEARGGGAAFSWGQEGP

SEQ ID NO: 3683 - protein, 1053 aa, Homo sapiens
MKLGNKSELNMESNSDAQDLVNSQKAMCNETTSFEKMAPSFDKDSNLSSDSTTVDGSSMSLAVDEGTGFIRCTVSMSLPKQLKLTCNEHLQSGRNLGVSAPQMQKESVIKEENSLRIVPKKPQRHSLPATGVLKKAASEELLEKSSYPSSEEKSSEKSLERNHLQHLCAQNRGVSSSFDMPKRASEKPVWKLPHPILPFSGNPEFLKSVTVSSNSEPSTALTKPRAKSLSAMDVEKCTKPCKDSTKKNSFKKLLSMKLSICFMKSDFQKFWSKSSQLGDTTTGHLSSGEQKGIESDWQGLLVGEEKRSKPIKAYSTENYSLESQKKRKKSRGQTSAANGLRAESLDDQMLSRESSSQAPYKSVTSLCAPEYENIRHYEEIPEYENLPFIMAIRKTQELEWQNSSSMEDADANVYEVEEPYEAPDGQLQLGPRHQHSSSGASQEEQNDLGLGDLPSDEEEIINSSDEDDVSSESSKGEPDPLEDKQDEDNGMKSKVHHIAKEIMSSEKVFVDVLKLLHIDFRDAVAHASRQLGKPVIEDRILNQILYYLPQLYELNRDLLKELEERMLHWTEQQRIADIFVKKGPYLKMYSTYIKEFDKNIALLDEQCKKNPGFAAVVREFEMSPRCANLALKHYLLKPVQRIPQYRLLLTDYLKNLIEDAGDYRDTQDALAVVIEVANHANDTMKQGDNFQKLMQIQYSLNGHHEIVQPGRVFLKEGILMKLSRKVMQPRMFFLFNDALLYTTPVQSGMYKLNNMLSLAGMKVRKPTQEAYQNELKIESVERSFILSASSATERDEWLEAISRAIEEYAKKRITFCPSRSLDEADSENKEEVSPLGSKAPIWIPDTRATMCMICTSEFTLTWRRHHCRACGKIVCQACSSNKYGLDYLKNQPARVCEHCFQELQKLDHQHSPRIGSPGNHKSPSSALSSVLHSIPSGRKQKKIPAALKEVSANTEDSSMSGYLYRSKGNKKPWKHFWFVIKNKVLYTYAASEDVAALESQPLLGFTVIQVKDENSESKVFQLLHKNMLFYVFKAEDAHSAQKWIEAFQEGTIL

SEQ ID NO: 3684 - protein, 545 aa, Homo sapiens
MQNKLCFSLDPFQLPAKTEPIKERAVQPAPTRKPTVIRIPAKPGKCLHEDPQSPPPLPAEKPIGNTFSTVSGKLSNVERTRNLESNHPGQTGGFVRVPPRLPPRPVNGKTIPTQQPPTKVPPERPPPPKLSATRRSNKKLPFNRSSSDMDLQKKQSNLATGLSKAKSQVFKNQDPVLPPRPKPGHPLYSKYMRGDVLVMLKQTENNYLECQKGEDTGRVHLSQMKIITPLDEHLRSRPNDPSHAQKPVDSGAPHAVVLHDFPAEQVDDLNLTSGEIVYLLEKIDTDWYRGNCRNQIGIFPANYVKVIIDIPEGGNGKRECVSSHCVKGSRCVARFEYIGEQKDELSFSEGEIIILKEYVNEEWARGEVRGRTGIFPLNFVEPVEDYPTSGANVLSTKVPLKTKKEDSGSNSQVNSLPAEWCEALHSFTAETSDDLSFKRGDRIQILERLDSDWCRGRLQDREGIFPAVFVRPCPAEAKSMLAIVPKGRKAKALYDFRGENEDELSFKAGDIITELESVDDDWMSGELMGKSGIFPKNYIQFLQIS

SEQ ID NO: 3685 - protein, 646 aa, Homo sapiens
MNECNVHKEGYNELNQYLTTTQSKIFQCDKYVKVFHKLLNSNRHNTKHTGKKPFKCKKCGKSFCMLLHLCQHKRIHIRENSYRCEECGKAFIWFSTLTRHRRVHTGEKSYKYECGKSFNQDSNLTTHKRIHTGQKPYKCEECGTSFYQFSYLTRHKLIHTREKPYKCEQYGKTFNQSSTLIGHKIIHNGEKPYKCEECGKALSIFSTPTKHKIIHTEEKSHRCEEYCKAYKESSHLTTHKRIHTGEKPYKCEECGKAFSIFSTLTKHKIIHTEEKSHRCEECGKAYKESSHVTTHKRIHTGEKPYKCEECGKTFSVFSILTKHKIIHTEEKPYKCEECGKAFKRSSTLTKHRIIHTEEKPYKCEECGKAFNQSSTLSIHKIIHTGEKPYKCEECGKAFKRSSTLTIHKMIHTGEKPYKCEECGKAFNRSSHLTTHKRIHTGHKPYKCKECGKSFSVFSTLTKHKIIHTDKKPYKCEECGKAFNRSSILSIHKKIHTGEKPYKCEECGKAFKRSSHLAGHKQIHSVQKPYKCEECGKAFSIFSTLTKHKIIHTEEKPYKCEKCGKTFYRFSNLNTHKIIHTGEKPCKCEECGKAFNHSSNLIKHKLIHTGDKPYKCEACGKAFRRSSHLSRHKIIHIGIHTEETVQK

SEQ ID NO: 3686 - protein, 157 aa, Homo sapiens
MAMEGYWRFLALLGSALLVGFLSVIFALVWVLHYREGLGWDGSALEFNWHPVLMVTGFVFIQGIASFRFFSLSASMGSAFSPSISHAHTCLFWNCHLWNSDCNSTYGIDRETDFFPERSCIQYIPARRCFRKYAWPSDPGVRGPHFLDSHQTAMETS

SEQ ID NO: 3687 - protein, 688 aa, Homo sapiens [sequence omitted]

SEQ ID NO: 3688 - protein, 162 aa, Homo sapiens [sequence omitted]

SEQ ID NO: 3689 - protein, 491 aa, Homo sapiens
MNSMEAAVGTEVPLLDNLQHCNSGNMKPPLLVFIVCLLWLKDSHCAPTWKDKTAISENLKSFSEVGEIDADEEVKKALTGIKQMKIMMERKEKEHTNLMSTLKKCREEKQEALKLLNEVQEHLEEEERLCRESLADSWGECRSCLENNCMRIYTTCQPSWSSVKNKIERFFRKIYQFLFPFHEDNEKDLPISEKLIEEDAQLTQMEDVFSQLTVDVNSLFNRSFNVFRQMQQEFDQTFQSHFISDTDLTEPYFFPAFSKEPMTKADLEQCWDIPNFFQLFCNFSVSIYESVSETITKMLEAIEDLPKQDKAPDHGGLISKMLPGQDRGLCGELDQNLSRCFKFHEKCQKCQAHLSEDCPDVPALHTELDEAIRLVNVSNQQYGQILQMTRKHLEDTAYLVEKMRGQFGWVSELANQAPETEIIFNSIQVVPRIHEGNISKQDETMMTDLSILPSSNFTLKIPLEESAESSNFIGYVVAKALQHFKEHFKTW

SEQ ID NO: 3690 - protein, 911 aa, Homo sapiens
MCSHFTQDFLPVQGIEDSFHKLILRRYEKCGHDNLQLRKGCKSMNVCKVQKGVYNGINKCLSNTQSKIFQCNARVKVFSKFANSNKDKTRHTGEKHFKCNECGKSFQKFSDLTQHKGIHAGEKPYTCEERGKDFGWYTDLNQHKKIHTGEKPYKCEECGKAFNRSTNLTAHKRIHNREKAYTGEDRDRAFGWSTNLNEYKKIHTGDKPYKCKECGKAFMHSSHLNKHEKIHTGEKPYKCKECGKVISSSSSFAKHKRIHTGEKPFKCLECGKAFNISTTLTKHRRIHTGEKPYTCEVCGKAFRQSANLYVHRRIHTGEKPYTCGECGKTFRQSANLYVHRRIHTGEKPYKCEDCGKAFGRYTALNQHKKIHTGEKPYKCEECGKAFNSSTNLTAHKRIHTREKPYTCEDRGRAFGLSTNLNEYKKIHTGDKPYKCKECGKAFIHSLHLNKHEKIHTGKKPYKCKQCGKVITSSSSFAKHKRIHTGEKPFECLECGKAFTSSTTLTKHRRIHTGEKPYTCEVCGKAFRQSAILYVHRRIHTGEKPYTCEECGKTFRQSANLYVHRRIHTGEKPYKCEECGKAFGRYTDLNQHKKIHTGEKLYKCEECGKDFVWYTDLNQQKKIYTGEKPYKCEECGKAFAPSTDLNQHTKILTGEQSYKCEECGKAFGWSIALNQHKKIHTGEKPYKCEECGKAFSRSRNLTTHRRVHTREKPYKCEDRGRSFGWSTNLNEYKKIHTGDKLYKCKECGKVFKQSSHLNRHEKIHTGKKPYKCKECGKVITSSSSFAKHKRIHTGEKPFKCLECGKAFTSSTTLTKHRRIHTGEKPYTCEECGKAFRQSAILYVHRRIHTGEKPYTCGECGKTFRQSANLYAHKKIHTGEKPYTCGDCGKTFRQSANLYAHKKIHTGDKTIQV

SEQ ID NO: 3691 - protein, 127 aa, Homo sapiens [sequence omitted]

SEQ ID NO: 3692 - protein, 724 aa, Homo sapiens
MKSAKGIENLAFVPSSPDILRRLSASPSQIEVSALSSDPQRENSQPQELQKPQEPQKSPEPSLPSAPPNVSEEKLRSLSLSEFEEGSYGWRNFHPQCLQRCNTPGGFLLHYCLLAVTQGIVVNGLVNISISTVEKRYEMKSSLTGLISSSYDISFCLLSLFVSFFGERGHKPRWLAFAAFMIGLGALVFSLPQFFSGEYKLGSLFEDTCVTTRNSTSCTSSTSSLSNYLYVFILGQLLLGAGGTPLYTLGTAFLDDSVPTHKSSLYIGTGYAMSILGPAIGYVLGGQLLTIYIDVAMGESTDVTEDDPRWLGAWWIGFLLSWIFAWSLIIPFSCFPKHLPGTAEIQAGKTSQAHQSNSNADVKFGKSIKDFPAALKNLMKNAVFMCLVLSTSSEALITTGFATFLPKFIENQFGLTSSFAATLGGAVLIPGAALGQILGGFLVSKFRMTCKNTMKFALFTSGVALTLSFVFMYAKCENEPFAGVSESYNGTGELGNLIAPCNANCNCSRSYYYPVCGDGVQYFSPCFAGCSNPVAHRKPKVYYNCSCIERKTEITSTAETFGFEAKAGKCETHCAKLPIFLCIFFIVIIFTFMAGTPITVSILRCVNHRQRSLALGIQFMVLRLLGTIPGPIIFGFTIDSTCILWDINDCGIKGACWIYDNIKMAHMLVAISVTCKVITMFFNGFAIFLYKPPPSATDVSFHKENAVVTNVLAEQDLNKIVKEG

SEQ ID NO: 3693 - protein, 207 aa, Homo sapiens
MVELVEGARKLRHVFLFTDLLLCTKLKKQSGGKTQQYDCKWYIPLTDLSFQMVDELEAVPNIPLVPDEELDALKIKISQIKSDIQREKRANKGSKATERLKKKLSEQESLLLLMSPSMAFRVHSRNGKSYTFLISSDYERAEWRENIREQQKKCFRSFSLTSVELQMLTNSCVKLQTVHSIPLTINKEGGPPRFRVQGTCREGRQLA

SEQ ID NO: 3694 - protein, 588 aa, Homo sapiens
MNDRLPGKKTTKLWVPDEEVSPETMVKIQAIKMMVRWLLGMKNNHSKSGTSTLRLLTTILHSDGDLTEQGKISKPDMSRLRLAAGSAIVKLAQEPCYHEIITLEQYQLCALAINDECYQVRQVFAQKLHKGLSRLRLPLEYMAICALCAKDPVKERRAHARQCLVKNINVRREYLKQHAAVSEKLLSLLPEYVVPYTIHLLAHDPDYVKVQDIEQLKDVKECLWFVLEILMAKNENNSHAFIRKMVENIKQTKDAQGPDDAKMNEKLYTVCDVAMNIIMSKSTTYSLESPKDPVLPARFFTQPDKNFSNTKNYLPPEMKSFFTPGKPKTTNVLGAVNKPLSSAGKQSQTKSSRMETVSNASSSPNPSSPGRIKGRLDSSEMDHSENEDYTMSSPLPGKKSDKRDDSDLVRSELEKPRGRKKTPVTEQEEKLGMDDLTKLVQEQKPKGSRRSRKRGHTASESDEQQWPEEKRLKEDILENEDEQNSPPKKGKRGRPPKPLGGGTPKEEPTMKTSKKGSKKKSGPPAPEEEEEEERQSGNTEQKSKSKQHRVSRRAQQRAESPESSAIESTQSTPQKGRGRPSKTPSPSQ

SEQ ID NO: 3695 - protein, 328 aa, Homo sapiens
MQCVPDVYIDSMGYAFTLPLFKYIGGCQVGSYVHYPTISTDMLSVVKNQNIGFNNAAFITRNPFLSKVKLIYYYLFAFIYGLVGSCSDVVMVNSSWTLNHILSLWKAGNCTNIVYPPCDVQTFLDIPLHEKKMTPGHLLVSVGQFRPEKNHPLQIRAFAKLLNKKMVESPPSLKLVLIGGCRNKDDELRVNQLRRLSEDLGVQEYVEFKINIPFDELKNYLSEATIGLHTMWNEHFGIGVVECMAAGTIILAHNSGGPKLDIVVPHEGDITGFLAESEEDYAETIAHILSMSAEKRLQIRKSARASVSRFSDQEFEVTFLSSVEKLFK

SEQ ID NO: 3696 - protein, 1307 aa, Homo sapiens [sequence omitted]

SEQ ID NO: 3697 - protein, 252 aa, Homo sapiens
MSIHFSSPVFTSRSAAFSGRGAQVRLSSARPGGLGSSSLYGLGASRPRVAVRSAYGGPVGAGIREVTINQSLLAPLRLDADPSLQRVRQEESEQKSAKSSRLPDIFEAQIAGLRGQLEALQVDGGRLEAELRSMQDVVEDFKNKYEDEINRRTAAENEFVVLKKDVDASYMSKVELEAKVDALNDEINFLRTLNETELTELQSQISDTSVVLSMDNSRSLDLDGIIAEVKAQYEEMAKCSRAEAEAWYQTKV

SEQ ID NO: 3698 - protein, 100 aa, Homo sapiens [sequence omitted]

SEQ ID NO: 3699 - protein, 525 aa, Homo sapiens
MSKASPSSLLAKFSEDTLSSYTEAVSSQEMLRCIWGHFLRVLGGTSPTLSHSSSLLHSLGSVTVLCCVDKQGILSWPNPSPETVLFFSGKVEPPHSSHEDLTDGLSTRSFCHPEVEEEPHERDALLAGSLNNTLHLSNEQERGDWPGEAPKPPEPYSHHKAHGRSKHPSGSNTQPGMESDPYEAEDFVCDYHLEMLSLSQDQQNPSCIQFDDSNWQLHLTSLKPLGLNVLLNLCDASVTERLCRFSDHLCNIALQESHSAVLPVHVPWGLCELARLIGFTPGAKELFKQENHLALYRLPSAETMKETSLGRLSCVTKRRPPLSHMISLFIKDTTTSTEQMLSHGTADVVLEACTDFWDGADIYPLSGSDRKKVLDFYQRACLSGYCSAFAYKPMNCALSSQLNGKCIELVQVPGQSSIFTMCELPSTIPIKQNARRSSWSSDEGIGEVLEKEDCMQALSGQIFMGMVSSQYQARLDIVRLIDGLVNACIRFVYFSLEDELKSKVFAEKNGPGDRLELPHLPHTQW

SEQ ID NO: 3700 - protein, 1647 aa, Homo sapiens [sequence omitted]

SEQ ID NO: 3701 - protein, 119 aa, Homo sapiens [sequence omitted]

SEQ ID NO: 3702 - protein, 386 aa, Homo sapiens; identical to SEQ ID NO: 2529

SEQ ID NO: 3703 - protein, 705 aa, Homo sapiens
MFMFCEWAFLSGAALSSLDKEGLSALSWACLKGHRAVVQYLVEEGAAIDQTDKNGRTPLDLAAFYGDAETVLYLVEKGAVIEHVDHSGMRPLDRAIGCRNTSVVVALLRKGAKLGNAAWAMATSKPDILIILLQKLMEEGNVMYKKGKMKEAAQRYQYALRKFPREGFGEDMRPFNELRVSLYLNLSRCRRKTNDFGMAEEFASKALELKPKSYEAFYARARAKRNSRQFVAALADLQEAVKLCPTNQEVKRLLARVEEECKQLQRSQQQKQQGPLPAPLNDSENEEDTPTPGLSDHFHSEETEEEETSPQEESVSPTPRSQPSSSVPSSYIRNLQEGLQSKGRPVSPQSRAGIGKSLREPVAQPGLLLQPSKQAQIVKTSQHLGSGQSAVRNGSMKVQISSQNPPPSPMPGRIAATPAGSRTQHLEGTGTFTTRAGCGHFGDRLGPSQNVRLQCGENGPAHPLPSKTKTTERLLSHSSVAVDAAPPNQGGLATCSDVRHPASLTSSGSSGSPSSSIKMSSSTSSLTSSSSFSDGFKVQGPDTRIKDKVVTHVQSGTAEHRPRNTPFMGIMDKTARFQQQSNPPSRSWHCPAPEGLLTNTSSAAGLQSANTEKPSLMQVGGYNNQAKTCSVSTLSASVHNGAQVKELEESKCQIPVHSQENRITKTVSHLYQESISKQQPHISNEAHRSHLTAAKPKRSFIESNV

SEQ ID NO: 3704 - protein, 157 aa, Homo sapiens
MAIIKKSGNNRCWRGCGEIGTLSHCWWDCKLVQPLWKSVWRFLRDLELETPFDPAIPLLGIYPKDYKSCCYKDTCTRMFIVALFTIAKTWNQPKCPTMIDWIKKTWHIYTMEYYAAIKNDEFMSFVGTWMKLEIIILSKLSQEQKTKHRIFSLIGGN

SEQ ID NO: 3705 - protein, 383 aa, Homo sapiens
MRKIEAWHSQMACSGYLLVGTGANIEVWSYISLPQVLPILPLCIVPFFPHSLCPSYNICEDCEAGPYGHDTNHVLLKLRRPVVGSSEPFCHSKYSTPRLPAALEQVRLQKQVDKNFLKAEKQRLRAEKKQRKAEVKELKKQLKLHRKIHLWNSIHGLQSPKSPLGRPESLLQSNTLMLPLQPCTSVMPMLSAAFVDENLPDGTHLQPGTKFIKHWRMKNTGNVKWSADTKLKFMWGNLTLASTEKKDVLVPCLKAGHVGVVSVEFIAPALEGTYTSHWRLSHKGQQFGPRVWCSIIVDPFPSEESPDNIEKGMISSSKTDDLTCQQEETFLLAKEERQLGEVTEQTEGTAACIPQKAKNVASERELYIPSVDLLTAQVEDSAL

SEQ ID NO: 3706 - protein, 411 aa, Homo sapiens
MAPNLDSFGRDRALYQEHAKRRIAEREARRTRRRQAREQTGKMADHLEGLSSDDEETSTDITNFNLEKDRISKESGKVFEDVLESFYSIDCIKSQFEAWRSKYYTSYKDAYIGLCLPKLFNPLIRLQLLTWTPLEAKCRDFENMLWFESLLFYGCEEREQEKDDVDVALLPTIVEKVILPKLTVIAENMWDPFSTTQTSRMVGITLKLINGYPSVVNAENKNTQVYLKALLLRMRRTLDDDVFMPLYPKNVLENKNSGPYLFFQRQFWSSVKLLGNFLQWYGIFSNKTLQELSIDGLLNRYILMAFQNSEYGDDSIKKAQNVINCFPKQWFMNLKGERTISQLENFCRYLVHLADTIYRNSIGCSDVEKRNARENIKQIVKLLASVRALDHAMSVASDHNVKEFKSLIEGK

SEQ ID NO: 3707 - protein, 109 aa, Homo sapiens [sequence omitted]

SEQ ID NO: 3708 - protein, 581 aa, Homo sapiens [sequence omitted]

SEQ ID NO: 3709 - protein, 788 aa, Homo sapiens [sequence omitted]

SEQ ID NO: 3710 - protein, 901 aa, Homo sapiens
MSLELEDAKKKVAEFQKQCEEYLVIIVQQKREADEQQKALESLNKKDIGEIKSYGRPPAQVEIVMQAVMILRGNEPTWAEAKRQLGEQNFIKSLINFDKDNISDKVLKKIGAYCAQPDFQPDIIGRVSLAAKSLCMWVRAMELYGRLYRVVEPKRIRMNAALAQLREKQAALAEAQEKLREVAEKLEMLKKQYDEKLAQKEELRKKSEEMELKLERAGMLVSGLAGEKARWEETVQGLEEDLGYLVGDCLLAAAFLSYMGPFLTNYRDEIVNQIWIGKIWELQVPCSPSFAIDNFLCNPTKVRDWNIQGLPSDAFSTENGIIVTRGNRWALMIDPQAQALKWIKNMEGGQGLKIIDLQMSDYLRILEHAIHFGYPVLLQNVQEYLDPTLNPMLNKSVARIGGRLLMRIGDKEVEYNTNFRFYITTKLSNPHYSPETSAKTTIVNFAVKEQGLEAQLLGIVVRKERPELEEQKDSLVINIAAGKRKLKELEDEILRLLNEATGSLLDDVQLVNTLHTSKITATEVTEQLETSETTEINTDLAREAYRPCAQRASILFFVLNDMGCIDPMYQFSLDAYISLFILSIDKSHRSNKLEDRIDYLNDYHTYAVYRYTCRTLFERHKLLFSFHMCAKILETSGKLNMDEYNFFLRGGVVLDREGQMDNPCSSWLADAYWDNITELDKLTNFHGLMNSFEQYPRDWHLWYTNAAPEKAMLPGEWENACNEMQRMLIVRSLRQDRVAFCVTSFIITNLGSRFIEPPVLNMKSVLEDSTPRSPLVFILSPGVDPTSALLQLAEHMGMAQRFHALSLGQGQAPIAARLLREGVTQGHWVFLANCHLSLSWMPNLDKLVEQLQVEDPHPSFRLWLSSIPHPDFPISILQVSIKMTTEPPKGLKANMTRLYQG

SEQ ID NO: 3711 - protein, 270 aa, Homo sapiens
MVMHARSGGNLEVMGLMLGKVDGETMIIMDSFALPVEGTETRVNAQAAAYEYMAAYIENAKQVGRLENAIGWYHSHPGYGCWLSGIDVSTQMLNQQFQEPFVAVVIDPTRTISAGKVNLGAFRTYPKGYKPPDEGPSEYQTIPLNKIEDFGVHCKQYYALEVSYFKSSLDRKLLELLWNKYWVNTLSSSSLLTNADYTTGQVFDLSEKLEQSEAQLGRGSFMLGLETHDRKSEDKLAKATRDSCKTTIEAIHGLMSQVIKDKLFNQINIS

SEQ ID NO: 3712 - protein, 431 aa, Homo sapiens
MASSLLEEEVHYGSSPLAMLTAACSKFGGSSPLRDSTTLGKAGTKKPYSVGSDLSASKTMGDAYPAPFTSTNGLLSPAGSPPAPTSGYANDYPPFSHSFPGPTGTQDPGLLVPKGHSSSDCLPSVYTSLDMTHPYGSWYKAGIHAGISPGPGNTPTPWWDMHPGGNWLGGGQGQGDGLQGTLPTGPAQPPLNPQLPTYPSDFAPLNPAPYPAPHLLQPGPQHVLPQDVYKPKAVGNSGQLEGSGGAKPPRGASTGGSGGYGGSGAGRSSCDCPNCQELERLGAAAAGLRKKPIHSCHIPGCGKVYGKASHLKAHLRWHTGERPFVCNWLFCGKRFTRSDELERHVRTHTREKKFTCLLCSKRFTRSDHLSKHQRTHGEPGPGPPPSGPKELGEGRSTGEEEASQTPRPSASPATPEKAPGGSPEQSNLLEI

SEQ ID NO: 3713 - protein, 106 aa, Homo sapiens
MSMFFLVLITVPPPPPDRPGLQEKRKVEQLQYNLELAFHHHLCKTHRQSILAKLPPKGKLRSLCSQHVERLQIFQHLHPIVVQAAFPPLYKELFSTETESPVGLSK

SEQ ID NO: 3714 - protein, 128 aa, Homo sapiens [sequence omitted]

SEQ ID NO: 3715 - protein, 192 aa, Homo sapiens [sequence omitted]

SEQ ID NO: 3716 - protein, 130 aa, Homo sapiens [sequence omitted]

SEQ ID NO: 3717 - protein, 176 aa, Homo sapiens
MSGELSNRFQGGKAFGLLKARQERRLAEINRYCAGREPQLQRISCSQHSCLLALLFQEFLCDQKYSDEENLPEKLTAFKEKYMEFDLNNEGEIDLMSLKRMMEKLGVPKTHLEMKKMISEVTGGVSDTISYRDFVNMMLGKRSAVLKLVMMFEGKANESSPKPVGPPPERDIASLP

SEQ ID NO: 3718 - protein, 325 aa, Homo sapiens
MKAKDLIVTPATILKEKPDPNNLVFGTVFTDHMLTVEWSSEFGWEKPHIKPLQNLSLHPGSSALHYAVEVFDKEELLECIQQLVKLDQEWVPYSTSASLYIRPTFIGTEPSLGVKKPTKALLFVLLSPVGPYFSSGTFNPVSLWANPKYVRAWKGGTGDCKMGGNYGSSLFAQCEAVDNGCQQVLWLYGEDHQITEVGTMNLFLYWINEDGEEELATPPLDGIILPGVTRRCILDLAHQWGEFKVSERYLTMDDLTTALEGNRVREMFGSGTACVVCPVSDILYKGETIHIPTMENGPKLASRILSKLTDIQYGREESDWTIVLS

SEQ ID NO: 3719 - protein, 184 aa, Homo sapiens
MPQNCSAPVPMEGGSPMWAEQGCPRQDVQPPGTGELGGPAAPWLRITRCLDLDTFGLFTSLVGFQTRHFWLPPCLPSLLPTHTCSFCRSCLSQTFFLFLSLPTSLPPHPLPEEGKNSVSHKQNICHSIGGRTEAGAQNILEGTQARVEGLSCLIWKEDFDVTLLRLSWEASRCFMASTLCVKDG

SEQ ID NO: 3720 - protein, 384 aa, Homo sapiens
MGPGPSPNWTLDPEPRCRLWSEPRLPAGPGVLAAGSPRLPCRYVMTSEFTLGPTAEFFREHNFFHLDPANVVMFEQRLLPAVTFDGKVILERKDKVAMAPDGNGGLYCALEDHKILEDMERRGVEFVHVYCVDNILVRLADPVFIGFCVLQGADCGAKVVEKAYPEEPVGVVCQVDGVPQVVEYSEISPETAQLRVSDGSLLYNAGNICNHFFTRGFLKAVTREFEPLLKPHVAVKKVPYVDEEGNLVKPLKPNGIKMEKFVFDVFRFAKNFAALEVLREEEFSPLKNAEPADRDSPRTARQALLTQHYRWALRAGARFLDAHGAWLPELPSLPPNGDPPAICEISPLVSYSGEGLEVYLQGREFQSPLILDEDQAREPQLQES

SEQ ID NO: 3721 - protein, 379 aa, Homo sapiens
MIFMNTLRYLQTHEYLLDVDLWRLFANLEELTQTSLGFVNSLFGIIKDYVDASEISSSLDFISVLTKYFRGSLCQSHQTYCLNYSAAIFYLESLRQRDDFGIYLKWCEQNEQCRRLHVPELLVAPLQRLTRYPLLLKNIWKRSMDSAEKIMIYSIKEKVEKSIRDLEGKVKWLDNFQKFRYLQEIIVWPPLWDRDKRFFIPECLKHIFKEHMAENILSPTSRHLLYEGKLTLAESTRFLDVYLFLFNDFLLVTKTKCNKKKLGGSDPGLMCPSLTPELQAVIKEGGSCTVLDQPIPLDRLVVKSIEPLHVSVFGLRNAFLIQHENRYRQCIAAFLLQAQTENIKKTWMAQITTAISCFTKSQETKKISLFTLPAESSEI

SEQ ID NO: 3722 - protein, 756 aa, Homo sapiens [sequence omitted]

SEQ ID NO: 3723 - protein, 200 aa, Homo sapiens [sequence omitted]

SEQ ID NO: 3724 - protein, 209 aa, Homo sapiens [sequence omitted]

SEQ ID NO: 3725 - protein, 143 aa, Homo sapiens
MAKGLLEPHPSFKFWFKKFHAMPHMALPRCLFDLPGLSVLSSPLSSFAMWLGGGWRPPCWPLGAAAKARRLRTPWHLWISTTRLLFCSCLCKNENLPPYHLCCVGLRRHGLTHPASCKPSGTSQCSPPAFYYSHHPGTLVQAP

SEQ ID NO: 3726 - protein, 208 aa, Homo sapiens [sequence omitted]

SEQ ID NO: 3727 - protein, 114 aa, Homo sapiens [sequence omitted]

SEQ ID NO: 3728 - protein, 731 aa, Homo sapiens [sequence omitted]

SEQ ID NO: 3729 - protein, 347 aa, Homo sapiens
MEHAATTGPRPGPPSRRVENVSPLGLAAPAMGLKSARSPKGQEGAGSCTLGLISARRGTFTAQPGREAGLVTAWEWGHSPAWDPPGEWVAVPPQVVLRAKDWLPGAPGGTAVWATSLEAEVPPDLALNKEQQLQISKELVDIQITTHHLHEQHEAEIFQLKSEILRLESRVLELELRGDGTSQGCAVPVESDPRHPRAAAQELRHKAQVPGHSDDHRFQVQPKNTMDPENEQHRLGSGVSVQPPSSGERAAPETPSLGSHPASPVCPTAAGGSEVGAGASGGPAAGTGDACVSGHLTWGPILEQREPLIVGLLSLTPVSSGQPWAGSCREPERRPGQPGSDWPHRLW

SEQ ID NO: 3730 - protein, 125 aa, Homo sapiens [sequence omitted]

SEQ ID NO: 3731 - protein, 125 aa, Homo sapiens
MYYFDQIQISILYHFPFALKTSFNIFYHASLVKTSFGLLSLKTVFINSSLFKSIFVVYRRVSWSFLKIFYYTLTSRVHVHNVQDCYICIHVPCWCAAPINSSFVLGISPNAIPSPSPHPTTGPSV

SEQ ID NO: 3732 - protein, 126 aa, Homo sapiens [sequence omitted]

SEQ ID NO: 3733 - protein, 1433 aa, Homo sapiens [sequence omitted]

SEQ ID NO: 3734 - protein, 170 aa, Homo sapiens
MMVALVRICCRFSLFLHLSRLLPSSWGRAEKIGEARELRKAREPLLLSTSSGLFLGTLGQSGSLHWGPLLPPPPEASTPFLPPPRQASTPSALLSLTWKRSPGRVASGKTVASQASGLRQVGVQIRGLASLQGLPHRHPNPFLDMRGDLLLSPPSRTPAPLFRNPSLAFS

SEQ ID NO: 3735 - protein, 242 aa, Homo sapiens
MWLQPLLAAIREDRHTVVCPVIDIISADTLAYSSSPVVRGGFNWGLHFKWDLVPLSELGRAEGATAPIKSPTMAGGLFAMNRQYFHELGQYDSGMDIWGGENLEISFRIWMCGGKLFIIPCSRVGHIFRKRRPYGSPEGQDTMTHNSLRLAHVWLDEYKEQYFSLRPDLKTKSYGNISERVELRKKLGCKSFKWYLDNVYPEMQISGSHAKPQQPIFVNRGPKRPKVLQRGRVRKLFFPSGL

SEQ ID NO: 3736 - protein, 487 aa, Homo sapiens [sequence omitted]

SEQ ID NO: 3737 - protein, 408 aa, Homo sapiens
MVQNGYYEETDYSALDGTINAHYTSRDELMEERLTKSEKINSDYLRDGINMPTVCTSGCLSFPSAPRESPCNVKYSSKSKFDAITKQPSSTSYNFTSSISWYESSPKPQIQAFLQAKEELKLLKLPGFMYSEVPLLASSVPYFSVEEEDGSEDGVHLIVCVHGLDGNSADLRLVKTYIELGLPGGRIDFLMSERNQNDTFADFDSMTDRLLDEIIQYIQIYSLTVSKISFIGHSLGNLIIRSVLTRPRFKYYLNKLHTFLSLSGPHLGTLYNSSALVNTGLWFMQKWKKSGSLLQLTCRDHSDPRQTFLYKLSNKAGLHYFKNVVLVGSLQDRYVPYHSARIEMCKTALKDKQSGQIYSEMIHNLLRPVLQSKDCNLVRYNVINALPNTADSLIGRAAHIAVLIRKYF

SEQ ID NO: 3738 - protein, 131 aa, Homo sapiens
MHYCKSLITSTMFTASSLVDFLLKNHIAHSQEPMPQQFTFSHETAVIQSHPQAPCLILVHLLVPPHLQLLPLLKSWNELLPNSCSCCILTSFHESPMFLMASRMVNPFLRVFNVLCPDPSEEPLPVTAKAL

SEQ ID NO: 3739 - protein, 627 aa, Homo sapiens
MKKRRKVTSNLEKIHLGYHKDSSEGNVAVECDQVTYTHSAGRPTPEALHCYQELPPSPDQRKLLSSLQYNKNLLKYLNDDRQKQPSFCDLLIIVEGKEFSAHKVVVAVGSSYFHACLSKNPSTDVVTLDHVTHSVFQHLLEFLYTSEFFVYKYEIPLVLEAAKFLDIIDAVKLLNNENVAPLHSELTEKSSPEETLNELTGRLSNNHQCKFCSRHFCYKKSLENHLAKTHRSLLLGKKHGLKMLERSFSARRSKRNRKCPVKFDDTSDDEQESGDGSDNLNQENFDKEKSDRNDSEDPGSEYNAEEDELEEEMSDEYSDIEEQSEKDHNDAEEEPEAGDSVGNVHEGLTPVVIQNSNKKILQCPKCDKTFDRIGKYESHTRVHTGEKPFECDICHQRYSTKSNLTVHRKKHSNETEFHKKEHKCPYCNKLHASKKTLAKHVKRFHPENAQEFISIKKTKSESWKCDICKKSFTRRPHLEEHMILHSQDKPFKCTYCEEHFKSRFARLKHQEKFHLGPFPCDICGRQFNDTGNLKRHIECTHGGKRKWTCFICGKSVRERTTLKEHLRIHSGEKPHLCSICGQSFRHGSSYRLHLRVHHDDKRYECDECGKTFIRHDHLTKHKKIHSD

SEQ ID NO: 3740 - protein, 312 aa, Homo sapiens [sequence omitted]

SEQ ID NO: 3741 - protein, 140 aa, Homo sapiens [sequence omitted]

SEQ ID NO: 3742 - protein, 294 aa, Homo sapiens
MVIVSPRVHGSYEHLWAGQVADALVDLTGGLAERWNLKGVAGSGGQQDRPGRWEHRTCRQLLHLKDQCLISCCVLSPRAGARELGEFHAFIVSDLRELQGQAGQCILLLRIQNPWGRRCWQGLWREGGEGWSQVDAAVASELLSQLQEGEFWVEEEEFLREFDELTVGYPVTEAGHLQSLYTERLLCHTRALPGAWVKGQSAGGCRNNSGFPSNPKFWLRVSEPSEVYIAVLQRSRLHAADWAGRARALVGDSHTSWSPASIPGKHYQAVGLHLWKGVTLGTTLFPVPSWMWPT

SEQ ID NO: 3743 - protein, 599 aa, Homo sapiens
MAPALGRVGKVVKVFGDGNLRVAVAGQRWTFSPSCLVAYRPEEDANLDVAERARENKSSLSVALDKLRAQKSDPEHPGRLVVEVALGNAARALDLLRRRPEQVDTKNQGRTALQVAAYLGQVELIRLLLQARAGVDLPDDEGNTALHYAALGNQPEATRVLLSAGCRADAINSTQSTALHVAVQRGFLEVVRALCERGCDVNLPDAHSDTPLHSAISAGTGASGIVEVLTEVPNIDVTATNSQGFTLLHHASLKGHALAVRKILARARQLVDAKKEDGFTALHLAALNNHREVAQILIREGRCDVNVRNRKLQSPLHLAVQQAHVGLVPLLVDAGCSVNAEDEEGDTALHVALQRHQLLPLVADGAGGDPGPLQLLSRLQASGLPGSAELTVGAAVACFLALEGADVSYTNHRGRSPLDLAAEGRVLKALQGCAQRFRERQAGGGAAPGPRQTLGTPNTVTNLHVGAAPGPEAAECLVCSELALLVLFSPCQHRTVCEECARRMKKCIRCQVVVSKKLRPDGSEVASAAPAPGPPRQLVEELQSRYRQMEERITCPICIDSHIRLVFQCGHGACAPCGSALSACPVCRQPIRDRIQIFV

SEQ ID NO: 3744 - protein, 138 aa, Homo sapiens
MSHRAQLIFVFLFYLFIYFLGDGVLLCHPGWSAVVRSWLTATSASQVAGITGMHHHAQLIFVFLVEMGFHCVGQAGLELLTSGDPPASASQSAGIIGVSHCTRPNFCIFSRDGVSPCWLSWSGTHGLKLSAHLSLPKC

SEQ ID NO: 3745 - protein, 110 aa, Homo sapiens [sequence omitted]

SEQ ID NO: 3746 - protein, 1300 aa, Homo sapiens
MNSNHCYYKHPKVQEKALWRRREVLVEAELDESYPNPTCYHCKNKCLPGKVPAEHITDIEDFHHLRFRYKYTCDDPDYPWSDWVNYDVFLATMTTKFNEFRKRESIMFQRRIAQNNAVTLPSSFNMNGASIKREWIAAVAERTRMRKSYVNRVAEAVSGELHNALSVTKDKLESTFKNLFVWTDETRPNDNCEDCAIVKMKCAKCKYWASDICIEKFKKEMAPADYDFDDPFFADIKSYSGSSSSVGVIQDILEASTSKEFQGPGAVNIMGTFLERNDLQVSPIVISWLLDLPNQYPANIITNFVGFLKQNIVAINRELIKYMSISRGIKMFKYVCKTIACDYHDPDYYNIQYVNGSFTMCCEPPLELKQLLEPVIDKMAFNRLLSSKCYCFADNRCSLQLPWAVRECVKKCLATKDKKEAWMLGLLQPVKELPEQFFSKMWQEFSIAFTKLSEWLPKSGQMIWDFVLSANGILSVLSAVLIGTAIARNCKSMHNEDKIVEGINNVNRRVFESNAYNLVPATVKSVKPASVKFQSLSQQTVVCDKLLEDNIVTMLLSSENENGHVCTKSYQCLMLRNKTMCIQRHYYDEWIRMPFNTKFYLQCKKTVSAAYPYGYQILLKNLKVIWGSGVDVDGSYTSNVGLVELPMSVPSFKDLTKFIAKEVDHEYVNSQECWIFDSIERKRCKVPITVDYKHTTSDDSGTVRLKQAYKYPYSKVGMCCSVLLCASLERPIIGLHFSGSARFGYSEYLTYESFNENIPTRVDKEYVFESFSHKLEDVELSKLSFDTMLYPCGVVPAELRQHQSGKTQIIPSSIHGTYPVTSEPNPLSCSDPRLPKGCSPLKLGIEHMGRPVLDFPTDLIEKAKEDLVEVVLTNVHPIRKVGLVSEQDAVCGNTQVKGFEPLEWSTSEGFPLSALRPKTTKGKKWLFDLEETPEGYKLKKMHPELYRTLKLEYNLRVRGIRVPTVFTDCLKDTCISTEKCRIPGKTRIFSISPVQYTIAFKMYFGDFLASYQNARLSAEHAIGIDPNSHDWSELASFLTQKGTSIIAGDYKNFGPGLMLTCVKAVCDVIIAWYELHDPDVERMLIRRVILSELLHAKHFALNLIYEVSAGIPSGSPITAPLNSLVNCMYVRCAWLDIIKEPLLHFRRACNMVTYGDDICICVSPLYIDKFNTLTLHNFFAKYNIVFTDQDKSDNIIPFRTLDTVTFLKRGFRPHPTLPSEMLAPIDIESIYKCTNWIKNKGDPTENTLQNCVQAVELAFGHGKYVYTEIRNNLLNVCRETVGKTFESYTWDDMSDRCYRT

SEQ ID NO: 3747 - protein, 456 aa, Homo sapiens [sequence omitted]

SEQ ID NO: 3748 - protein, 157 aa, Homo sapiens [sequence omitted]

SEQ ID NO: 3749 - protein, 110 aa, Homo sapiens [sequence omitted]

SEQ ID NO: 3750 - protein, 185 aa, Homo sapiens
MFGGLSGATVIDSLDTLYLMELKEEFQEAKAWVGESFHLNVSGEASLFEVNIRYIGGLLSAFYLTGEEVFRIKAIRLGEKLLPAFNTPTGIPKGVVSFKSGNWGWATAGSSSILAEFGSLHLEFLHLTELSGNQVFAEKASLLPTLLPAEQRDERAAATGFSEASGSSLMDQQEGSGEPGSPSYH

SEQ ID NO: 3751 - protein, 102 aa, Homo sapiens
MPLRLDIKRKLTARSDRVKSVDLHPTEPWMLASLYNGSVCVWNHETQVGIFQDFIRNKILCETVFIMKEKKYYNRIQNLYANCFLKLVQSILNMKELTFMRG

SEQ ID NO: 3752 - protein, 1407 aa, Homo sapiens
MEAEFYMVILTCLIFRNSEGFQIVHVQKQQCLFKNEKVVVGSCNRTIQNQQWMWTEDEKLLHVKSALCLAFIRNAAENYSQNSSERQHPNLHMTGITDTSWVLSTTQPFSSTTEETGLAEPERCNFTLAESKASSHSVSIQWRILGSPCNFSLIYSSDTLGAALCPTFRIDNTTYGCNLQDLQAGTIYNFRIISLDEERTVVLQTDPLPPARFGVSKEKTTSTSLHVWWTPSSGKVTSYEVQLFDENNQKIQGVQIQESTSWNEYTFFNLTAGSKYNIAITAVSGGKRSFSVYTNGSTVPSPVKDIGISTKANSLLISWSHGSGNVERYRLMLMDKGILVHGGVVDKHATSYAFHGLTPGYLYNLTVMTEAAGLQNYRWKLVRTAPMEVSNLKVTNDGSLTSLKVKWQRPPGNVDSYNITLSHKGTIKESRVLAPWITETHFKELVPGRLYQVTVSCVSGELSAQKMAVGRTFPDKVANLEANNNGRMRSLVVSWSPPAGDWEQYRILLFNDSVVLLNITVGKEETQYVMDDTGLVPGRQYEVEVIVESGNLKNSERCQGRTVPLAVLQLRVKHANETSLSIMWQTPVAEWEKYIISLADRDLLLIHKSLSKDAKEFTFTDLVPGRKYMATVTSISGDLKNSSSVKGRTVPAQVTDLHVANQGMTSSLFTNWTQAQGDVEFYQVLLIHENVVIKNESISSETSRYSFHSLKSGSLYSVVVTTVSGGISSRQVVVEGRTVPSSVSGVTVNNSGRNDYLSVSWLLAPGDVDNYEVTLSHDGKVVQSLVIAKSVRECSFSSLTPGRLYTVTITTRSGKYENHSFSQERTVPDKVQGVSVSNSARSDYLRVSWVHATGDFDHYEVTIKNKNNFIQTKSIPKSENECVFVQLVPGRLYSVTVTTKSGQYEANEQGNGRTIPEPVKDLTLRNRSTEDLHVTWSGANGDVDQYEIQLLFNDMKVFPPFHLVNTATEYRFTSLTPGRQYKILVLTISGDVQQSAFIEGFTVPSAVKNIHISPNGATDSLTVNWTPGGGDVDSYTVSAFRHSQKVDSQTIPKHVFEHTFHRLEAGEQYQIMIASVSGSLKNQINVVGRTVPASVQGVIADNAYSSYSLIVSWQKAAGVAERYDILLLTENGILLRNTSEPATTKQHKFEDLTPGKKYKIQILTVSGGLFSKEAQTEGRTVPAAVTDLRITENSTRHLSFRWTASEGELSWYNIFLYNPDGNLQERAQVDPLVQSFSFQNLLQGRMYKMVIVTHSGELSNESFIFGRTVPASVSHLRGSNRNTTDSLWFNWSPASGDFDFYELILYNPNGTKKENWKDKDLTEWRFQGLVPGRKYVLWVVTHSGDLSNKVTAESRTAPSPPSLMSFADIANTSLAITWKGPPDWTDYNDFELQWLPRDALTVFNPYN

SEQ ID NO: 3753 - protein, 185 aa, Homo sapiens [sequence omitted]

SEQ ID NO: 3754 - protein, 114 aa, Homo sapiens [sequence omitted]

SEQ ID NO: 3755 - protein, 492 aa, Homo sapiens [sequence omitted]

SEQ ID NO: 3756 - protein, 112 aa, Homo sapiens [sequence omitted]

SEQ ID NO: 3757 - protein, 337 aa, Homo sapiens
MKHLWFFLLVVAAPRWVLSQLQLQESGSSLVKPSQTLSLTCAVSGGSISGNDHSWNWIRQPFGKGLEWIGYMFQSGTTYYNPSLKSRVTISLDRSRNQFSLRLTSVTAADTAMYYCARGYSDLASSYFHMDVWGKGTTVTVSSTPTKAPDVFPIISGCRHPKDNSPVVLACLITGYHPTSVTVTWYMGTQSQPQRTFPEIQRRDSYYMTSSQLSTPLQQWRQGEYKCVVQHTASKSKKEVFRWPESPKAQASSVPTAQPQAEGSLAKATTAPATTRNTGRGGEEKKKEKEKEEQEERDKDTRVSEPHPASWRLPANPCSAGPVAPGQSHLHLLRGGQ

SEQ ID NO: 3758 - protein, 851 aa, Homo sapiens
MKMVCKDQASFLSDSNMFINLPRVKELLEDDKEKFNIPEDSTPFCLKLYQEILQLPNGALVWTFLKPILHGKILYTPNTPEINKVIQKANYTFYIVDKLKTLSETLLEMTSLFQRSGSGQMFNQLQEALRNKFVRNFVENQLHIDVDKLTEKLQTYGGLLDEMFNHAGAGRFRFLGSILVNLSSCVALNRFQALQSVDILETKAHELLQQNSFLASIIFSNSLFDKNFRSESVKLPPHVSYTIRTNVLYSVRTDVVKNPSWKFHPQNLPADGFKYNYVFAPLQDMIERAIILVQTGQEALEPAAQTQAAPYPCHTSDLFLNNVGFFFPLIMMLTWMVSVASMVRKLVYEQEIQIEEYMRMMGVHPVIHFLAWFLENMAVLTISSATLAIVLKTSGIFAHSNTFIVFLFLLDFGMSVVMLSYLLSAFFSQANTAALCTSLVYMISFLPYIVLLVLHNQLSFVNQTFLCLLSTTAFGQGVFFITFLEGQETGIQWNNMYQALEQGGMTFGWVCWMILFDSSLYFLCGWYLSNLIPGTFGLRKPWYFPFTASYWKSVGFLVEKRQYFLSSSLFFFNENFDNKGSSLQNREGELEGSAPGVTLVSVTKEYEGHKAVVQDLSLTFYRDQITALLGTNGAGKTTIISMLTGLHPPTSGTIIINGKNLQTDLSRVRMELGVCPQQDILLDNLTVREHLLLFASIKAPQWTKKELHQQVNQTLQDVDLTQHQHKQTRALSGGLKRKLSLGIAFMGMSRTVVLDEPTSGVDPCSRHSLWDILLKYREGRHWASFCLLFPQYCVAGNALLLYSRIKLYPSEATLSFSEKYKFLKALIGIYSLDNISIVLRIAYFVFDLLTQ

SEQ ID NO: 3759 - protein, 408 aa, Homo sapiens [sequence omitted]

SEQ ID NO: 3760 - protein, 211 aa, Homo sapiens
MKSVKVSENFSCNITLMCSVKGAEKSVLYSWTPREPHASESNGGSILTVSRTPCDPDLPYICTAQNPVSQRSSLPVHVGQFCTDPGASRGGTTGETVVGVLGEPVTLPLALPACRDTEKVVWLFNTSIISKEREEAATADPLIKSRDPYKNRVWVSSQDCSLKISQLKIEDAGPYHAYVCSEASSVTSMTHVTLLIYRESLGRAPITRFLL

SEQ ID NO: 3761 - protein, 174 aa, Homo sapiens
MTGACHHAQLIFVFLVEMEFCHVGQAGLKLIRPPWLGLQGRATAPSLFFVFLVEMGFCHVGQAGPEHLASGDLPASASQSAGITGTSHHAWLGPSFCLEALGCSPLTSSLKSHTTTFSFGVSLSPMPGWGIKTYGIFSTAPCFSFLSRNRPTAALLENSEDSHDFFWFFFFFFF

SEQ ID NO: 3762 - protein, 308 aa, Homo sapiens
MHSVAHPHPGVPPWVPATLIITGKRRGAAAGGAGLEHGGSGRAHLREVSAETWRTRGVGAGRLVTGPALASGPPCSQLYNGQGSPRTISWGLGHTRVGVASLLMLESLSGLALWFSPPPAASRPPGPGLSLYTDGSKAWGGRHRSTGGAHASLTHSQVSPPGSGNLTQHGHVCPCVTMPALKTTPPFLSPHRGLDAASWAQIHQKLRDFSRSTQVGGKGWPRPILTPCPSSWLTSPCQAELERERAQLLVRATMAEEQLSELQEYVDQHLGRYKHEILRLRKLAGAGDPWKVGAVPPAKPQHPRTGSH

SEQ ID NO: 3763 - protein, 823 aa, Homo sapiens [sequence omitted]

SEQ ID NO: 3764 - protein, 1079 aa, Homo sapiens
MNHMFHIKRHSISAGTDAYKKTKPIQNLFQKPLYDHCSANNYKSMEPELENVRSSPPRGDRTSKVSLKEELQQDMQRFKNEIGMLKVEFQALEKEKVQLQKEVEEERKKHRNNEMEVSANIHDGATDDAEDDDDDDGLIQKRKSGETDHQQFPRKENKEYASSGPALQMKEVKSTEKEKRTSKESVNSPVFGKASLLTGGLLQVDDDSSLSEIDEDEGRPTKKTSNEKNKVKNQIQSMDDVDDLTQSSETASEDCELPHSSYKNFMLLIEQLGMECKDSVSLLKIQDAALSCERLLELKKNHCELLTVKIKKMEDKVNVLQRELSETKEIKSQLEHQKVEWERELCSLRFSLNQEEEKRRNADTLYEKIREQLRRKEEQYRKEVEVKQQLELSLQTLEMELRTVKSNLNQVVQERNDAQRQLSREQNARMLQDGILTNHLSKQKEIEMAQKKMNSENSHSHEEEKDLSHKNSMLQEEIAMLRLEIDTIKNQNQEKEKKCFEDLKIVKEKNEDLQKTIKQNEETLTQTISQYNGRLSVLTAENAMLNSKLENEKQSKERLEAEVESYHSRLAAAIHDRDQSETSKRELELAFQRARDECSRLQDKMNFDVSNLKDNNEILSQQLFKTESKLNSLEIEFHHTRDALREKTLGLERVQKDLSQTQCQMKEMEQKYQNEQVKVNKYIGKQESVEERLSQLQSENMLLRQQLDDAHNKADNKEKTVINIQDQFHAIVQKLQAESEKQSLLLEERNKELISECNHLKERQYQYENEKAEREVVVRQLQQELADTLKKQSMSEASLEVTSRYRINLEDETQDLKKKLGQIRNQLQEAQDRHTEAVRCAEKMQDHKQKLEKDNAKLKVTIKKQMDKIEELQKNLLNANLSEDEKEQLKKLMELKQSLECNLGQEMKKNVELEREITGFKNLLKMTRKKLNEYENGEFSFHGDLKTSQFEMDIQINKLKHKIDDLTAELETAGSKCLHLDTKNQILQEELLSMKTVQKKCEKLQKNKKKLEQEVINLRSHIERNMVELGQVKQYKQEIEERARQEIAEKLKEVNLFLQAQAASQENLEQLREKQDLPD

SEQ ID NO: 3765 - protein, 577 aa, Homo sapiens [sequence omitted]

SEQ ID NO: 3766 - protein, 526 aa, Homo sapiens [sequence omitted]

SEQ ID NO: 3767 - protein, 737 aa, Homo sapiens
MLDKFSWSELCAVLQENVDALIADLNRANEKIRHLEYICKNKSDTMRELQQTQEDTFTKVAEQIKAQESCWHRQKKELELQYSELFLEVQKRAQKFQEIAEKNMEKLNHIEKSHEQLVLENSHFKKLLSQTQREQMSLLAACALMAGALYPLYSRSCALSTQRDFLQEQVNTFELFKLEIRTLAQALSTVEEKKQEEAKMKKKTFKGLIRIFRKGVIAVLAANRLKILGQSCASLFTWMESFKEGIGMLVCTGEPQDKHKFPKHQKEQLRCLQALSWLTSSDLLAAIISSMAELQDVIGKADPNSRICGHLLIGAAKNSFAKLMDKISLVMECIPLHSSRSITYVEKDSLVQRLAHGLHKVNTLALKYGLRGHVPITKSTASLQKQILGFTQRLHAAEVERRSLRLEVTEFKRSVNEMKKELDKAQGLQMQLNEFKQSKLITHEKFESACEELNNALLREEQAQMLLNEQAQQLQELNYRLELHSSEEADKNQTLGEAVKSLSEAKMELRRKDQSLRQLNRHLTQLEQDKRRLEENIHDAESALRMAAKDKECVANHMRAVENTLHKVRDQISLSWSAASRNDFTLQLPKLHLETFAMEGLKGGPEVVACQAMIKSFMDVYQLASTRIMTLEKEMTSHRSHIAALKSELHTACLRENASLQSIGSRDHSNLSIPSRAPLPADTTGIGDFLPLKAELDTTYTFLKETFINTVPHALTSSHSSPVTMSANANRPTQIGL

SEQ ID NO: 3768 - protein, 1020 aa, Homo sapiens
MWCTVSWTCLQTIRFSPDIFSSVSVPPSLKVCLDLSAEYLILSDVQRKVLYVMELLQNQEEGHACFSSISEFLLTHPVLSFGIQVVSRCRLRHTEVLPAEEENDSLGADGTHGAGAMESAAGVLIKLFCVHTKALQDVQIRFQPQLNPDVVAPLPTHTAHEDFTFGESRPELGSEGLGSAAHGSQPDLRRIVELPAPADFLSLSSETKPKLMTPDAFMTPSASLQQITASPSSSSSGSSSSSSSSSSSLTAVSAMSSTSAVDPSLTRPPEELTLSPKLQLDGSLTMSSSGSLQASPRGLLPGLLPAPADKLTPKGPGQVPTATSALSLELQEVEPLGLPQASPSRTRSPDVISSASTALSQDIPEIASEALSRGFGSSAPEGLEPDSMASAASALHLLSPRPRPGPELGPQLGLDGGPGDGDRHNTPSLLEAALTQEASTPDSQVWPTAPDITRETCSTLAESPRNGLQEKHKSLAFHRPPYHLLQQRDSQDASAEQSDHDDEVASLASASGGFGTKVPAPRLPAKDWKTKGSPRTSPKLKRKSKKDDGDAAMGSRLTEHQVAEPPEDWPALIWQQQRELAELRHSQEELLQRLCTQLEGLQSTVTGHVERALETRHEQEQRRLERALAEGQQRGGQLQEQLTQQLSQALSSAVAGRLERSIRDEIKKTVPPCVSRSLEPMAGQLSNSVATKLTAVEGSMKENISKLLKSKNLTDAIARAAADTLQGPMQAAYREAFQSVVLPAFEKSCQAMFQQINDSFRLGTQEYLQQLESHMKSRKAREQEAREPVLAQLRGLVSTLQSATEQMAATVAGSVRAEVQHQLHVAVGSLQESILAQVQRIVKGEVSVALKEQQAAVTSSIMQAMRSAAGTPVPSAHLDCQAQQAHILQLLQQGHLNQAFQQALTAADLNLVLYVCETVDPAQVFGQPPCPLSQPVLLSLIQQLASDLGTRTDLKLSYLEEAVMHLDHSDPITRDHMGSVMAQVRQKLFQFLQAEPHNSLGKAARRLSLMLHGLVTPSLP

SEQ ID NO: 3769 - protein, 628 aa, Homo sapiens
MNAILQSLSSLQSFANDLLKQGIPWKKIPLNALIRRFAHLLVKKDICNSETKKDLLKKVKNAISATAERFSGYMQNDAHEFLSQCLDQLKEDMEKLNKTWKTEPVSGEENSPDISATRAYTCPVITNLEFEVQHSIICKACGEIIPKREQFNDLSIDLPRRKKPLPPRSIQDSLDLFFRAEELEYSCEKCGGKCALVRHKFNRLPRVLILHLKRYSFNVALSLNNKIGQQVIIPRYLTLSSHCTENTKPPFTLGWSAHMAISRPLKASQMVNSCITSPSTPSKKFTFKSKSSLALCLDSDSEDELKRSVALSQRLCEMLGNEQQQEDLEKDSKLCPIEPDKSELENSGFDRMSEEELLAAVLEISKRDASPSLSHEDDDKPTSSPDTGFAEDDIQEMPENPDTMETEKPKTITELDPASFTEITKDCDENKENKTPEGSQGEVDWLQQYDMEREREEQELQQALAQSLQEQEAWEQKEDDDLKRATELSLQEFNNSFVDALGSDEDSGNEDVFDMEYTEAEAEELKRNAETGNLPHSYRLISVVSHIGSTSSSGHYISDVYDIKKQAWFTYNDLEVSKIQEAAVQSDRDRSGYIFFYMHKEIFDELLETEKNSQSLSTEVGKTTRQAS

SEQ ID NO: 3770 - protein, 374 aa, Homo sapiens
MAPPPKEVEEDSEDEEMSEDEEDDSSGEEVVIPQKKGKKAAATSAKKVVVSPTKKVAVATPAKKAAVTPGKKAAATPAKKTVTPAKAVTTPGKKGATPGKALVATPGKKGAAIPAKGAKNGKNAKKEDSDEEEDDDSEEDEEDDEDEDEDEDEIEPAAMKAAAAAPASEDEDDEDDEDDEDDDDDEEDDSEEEAMETTPAKGKKAAKVVPVKAKNVAEDQDEEEDDEDEDDDDDEDDEDDDDEDDEEEEEEEEEEPVKEAPGKRKKEMAKQKAAPEAKKQKVEGTEPTTAFNLFVGNLNFNKSAPELKTGISDVFAKNDLAVVDVRIGMTRKFGYVDFESAEDLEKALELTGLKVFGNEIKLEKPKGKDSKKGM

SEQ ID NO: 3771 - protein, 218 aa, Homo sapiens
MPDQDKKVKTTEKSTDKQQEITIRDYSDLKRLRCLLNVQSSKQQLPAINFDSAQNSMTKSEPAIRAGGHRARGQWHESTEAVELENFSINYKNERNFSKHPQRKLFQEIFTALVKNRLISREWVNRAPSIHFLRVLICLRLLMRDPCYQEILHSLGGIENLAQYMEIVANEYLGYGEEQHTVDKLVNMTCKCYCRDTAIFVDLLEKAVWCLQQETRIL

SEQ ID NO: 3772 - protein, 219 aa, Homo sapiens [sequence omitted]

SEQ ID NO: 3773 - protein, 328 aa, Homo sapiens [sequence omitted]

SEQ ID NO: 3774 - protein, 189 aa, Homo sapiens [sequence omitted]

SEQ ID NO: 3775 - protein, 128 aa, Homo sapiens
MGQDYYSVLGITRNSEDAQIKQAYRRLALKHHPLKSNEPSSAEIFRQIAEAYDVLSDPMKRGIYDKFGEEGLKGGIPLEFGSQTPWTTGYVFHGKPEKVFHEFFGGNNPFSGKRSSSPTLPYRERTLL

SEQ ID NO: 3776 - protein, 103 aa, Homo sapiens
MSDSRLTTNDLHIVPYLEDMSEREDQNPTSTSERNQPAFTWQEVGSGICMGFPLQQAEAALACPLPTKLFWPWKGAHSSSIRYSLGRADSQGGSSFYSQGAGI

SEQ ID NO: 3777 - protein, 612 aa, Homo sapiens
MWMHCCWAWPPRSQSERTMCWLKMCGVSLRLSLQVVNSWPLGRGSAGLPEPDFWPGPLEFSRTDHLASCLQRGRDLGLPSYTKARAALGLSPITRWQDINPALSRSNDTVLEATAALYNQDLSWLELLPGGLLESHRDPGPLFSTIVLEQFVRLRDGDRYWFENTRNGLFSKKEIEEIRNTTLQDVLVAVINIDPSALQPNVFVWHKGDPCPQPRQLSTEGLPACAPSVVRDYFEGSGFGFGVTIGTLCCFPLVSLLSAWIVARLRMRNFKRLQGQDRQSIVSEKLVGGMEALEWQGHKEPCRPVLVYLQPGQIRVVDGRLTVLRTIQLQPPQKVNFVLSSNRGRRTLLLKIPKEYDLVLLFNLEEERQALVENLRGALKESGLSIQEWELREQELMRAAVTREQRRHLLETFFRHLFSQVLDINQADAGTLPLDSSQKVREALTCELSRAEFAESLGLKPQDMFVESMFSLADKDGNGYLSFREFLDILVVFMKGSPEEKSRLMFRMYDFDGNGLISKDEFIRMLRSFIEISNNCLSKAQLAEVVESMFRESGFQDKEELTWEDFHFMLRDHNSELRFTQLCVKGVEVPEVIKDLCRRASYISQDMICPSP

SEQ ID NO: 3778 - protein, 1093 aa, Homo sapiens
MLCKKKKIPCSEEFLLSKTLGDPVKIRAWNIAGLPTDTFSIDNGVIVNNCRRWPLMIDPQGQANKWIKNSERENQLSVIKLSDSDYMRTLENCIQFGTPLLLENVGEELDPSLEPLLLRQTFKQGGIDCIRLGEVIIEYSFDFKFYITTKLRNPHYMPELATKVSLLNFMITPEGLEDQLLGIVVAKERPELEEERNALILQSAANKKQLKDIEKKILETLSSSEGNILEDESAIKVLDSAKMMSNEITKKQQIAEKTELKIAESREGYRPIAKHSSVLFFSIADLANIDPMYQYSLTWFVNLYINSIHDSNKSKILEKRLRYLNDHFTYNLYCNICRSLFEKDKLLFSFLLCANLLLARKEIEYQELMFLLTGGVSLKSAEKNPDPTWLQDKSWEEICRASEFPAFRGLRQHFCEHIYEWREIYDSKEPHNAKFPAPMDKNLNELQKIIILRCLRPDKITPAITNYVTDKLGKKFVEPPPFDLTKSYLDSNCTIPLIFVLSPGADPMASLLKFANDKSMSGNKFQAISLGQGQGPIAAKMIKAAIEEGTWVCLQNCHLAVSWMPMLEKICEDFTSETCNSSFRLWLTSYPSSKFPVTILQNGVKMTNEPPTGLRLNLLQSYLTDPVSDPEFFKGCRGKELAWEKLLFGVCFFHALVQERKKFGPLGWNIPYGFNESDLRISIRQLQLFINEYDTIPFEAISYLTGECNYGGRVTDDWDRRLLLTMLADFYNLYIVENPHYKFSPSGNYFAPPKGTYEDYIEFIKKLPFTQHPEIFGLHENVDISKDLQQTKTLFESLLLTQGGSKQTGASGSTDQILLEITKDILNKLPSDFDIEMALRKYPVRYEESMNTVLVQEMERFNNLIITIRNTLRDLEKAIKGVVVMDSALEALSGSLLVGKVPEIWAKRSYPSLKPLGSYITDFLARLNFLQDWYNSGKPCVFWLSGFFFTQAFLTGAMQNYARKYTTPIDLLGYEFEVIPSDTSDTSPEDGVYIHGLYLDGARWDRESGLLAEQYPKLLFDLMPIIWIKPTQKSRIIKSDAYVCPLYKTSERKGTLSTTGHSTNFVIAMLLKTDQPTRHWIKRGVALLCQLDD

SEQ ID NO: 3779 - protein, 123 aa, Homo sapiens
MDVADFVYPFNSWWTFGFSNFFFFTIMNICVQVFVWTNVFIFLITHLRVELVSHKITVFSFLRKCQIIFPSGCTILHSHQQWMRLPVSPHFCACEVAVSSWCLPFLKDSKVCRYRHSLAIFLR

SEQ ID NO: 3780 - protein, 130 aa, Homo sapiens [sequence omitted]

SEQ ID NO: 3781 - protein, 167 aa, Homo sapiens [sequence omitted]

SEQ ID NO: 3782 - protein, 972 aa, Homo sapiens
MMAAAAAAAAGSSSSGGGGGGSGSGSSSGSSSSDTSSTGEEERMRRLFQTCDGDGDGYISRNDLLMVCRQLNMEESVAEIMNQLGADENGKISFQDFTRCRMQLVREIRKEEVDLSAKSDNSCTKKLRDRIASWPTSSDNSLGALSAARESWEYDSGARDLQSPDVQSQSALQKLLEYGGSSLHQQAALHKLLTQSPHIGNSVGGSYLELANTLHSAALASLKGDIVELNKRLQQTERERDLLEKKLAKAQCEQSHLMREHEDVQERTTLRYEERITELHSVIAELNKKIDRLQGTTIREEDEYSELRSELSQSQHEVNEDSRSMDQDQTSVSIPENQSTMVTADMDNCSDLNSELQRVLTGLENVVCGRKKSSCSLSVAEVDRHIEQLTTASEHCDLAIKTVEEIEGVLGRDLYPNLAEERSRWEKELAGLREENESLTAMLCSKEEELNRTKATMNAIREERDRLRRRVRELQTRLQSVQATGPSSPGRLTSTNRPINPSTGELSTSSSSNDIPIAKIAERVKLSKTRSESSSSDRPVLGSEISGIGVSSSVAEHLAHSLQDCSNIQEIFQTLYSHGSAISESKIREFEVETERLNSRIEHLKSQNDLLTITLEECKSNAERMSMLVGKYESNATALRLALQYSEQCIEAYELLLALAESEQSLILGQFRAAGVGSSPGDQSGDENITQMLKRAHDCRKTAENAAKALLMKLDGSCGGAFAVAGCSVQPWESLSSNSHTSTTSSTASSCDTEFTKEDEQRLKDYIQQLKNDRAAVKLTMLELESIHIDPLSYDVKPRGDSQRLDLENAVLMQELMAMKEEMAELKAQLYLLEKEKKALELKLSTREAQEQAYLVHIEHLKSEVEEQKEQRMRSLSSTSSGSKDKPGKECADAASPALSLAELRTTCSENELAAEFTNAIRREKKLKARVQELVSALERLTKSSEIRHQQSAEFVNDLKRANSNLVAAYEK

SEQ ID NO: 3783 - protein, 570 aa, Homo sapiens
MAFRGWRPPPPPLLLLLLWVTGQAAPVAGLGSDAELQIERRFVPDECPRTVRSGDFVRYHYVGTFPDGQKFDSSYDRDSTFNVFVGKGQLITGMDQALVGMCVNERRFVKIPPKLAYGNEGVSGVIPPNSVLHFDVLLMDIWNSEDQVQIHTYFKPPSCPRTIQVSDFVRYHYNGTFLDGTLFDSSHNRMKTYDTYVGIGWLIPGMDKGLLGMCVGEKRIITIPPFLAYGEDGDGKDIPGQASLVFDVALLDLHNPKDSISIENKVVPENCERISQSGDFLRYHYNGTLLDGTLFDSSYSRNRTFDTYIGQGYVIPGMDEGLLGVCIGEKRRIVVPPHLGYGEEGRGNIPGSAVLVFDIHVIDFHNPSDSISITSHYKPPDCSVLSKKGDYLKYHYNASLLDGTLLDSTWNLGKTYNIVLGSGQVVLGMDMGLREMCVGEKRTVIIPPHLGYGEAGVDGEVPGSAVLVFDIELLELVAGLPEGYMFIWNGEVSPNLFEEIDKDGNGEVLLEEFSEYIHAQVASGKGKLAPGFDAELIVKNMFTNQDRNGDGKVTAEEFKLKDQEAKHDEL

SEQ ID NO: 3784 - protein, 302 aa, Homo sapiens
MPCRLLHQRETRSGGPRGPRHSAPTGPGWHNAPTLQSWEESHAPSRDPRDHQGSVEDTSLGGDAPADGVSPSVPPLQGLGKAAGPGGTGQAECQVVVATHRANLKPWDGRAAPLGKRTEEGRLSTSSCASVSRNKPDSVPQGDPVWPPESTGPALCAGEETEPQSSEGLAWGPWAQPWAPSLCPSQTGTASTASPQRASRLALQGPPGTILSLSSSSPCLPPSHCDPGAASSWAGLQSLKLLLQVSFQGAADGCSLRDANTNRKGPMHGSDFPPRLCLHSMSLWGSWGSRPPSPAHSREVAS

SEQ ID NO: 3785 - protein, 113 aa, Homo sapiens [sequence omitted]

SEQ ID NO: 3786 - protein, 792 aa, Homo sapiens
MRLVNEMYQTSLRQFLGLFDLSLARSVKSPITSKRIANIIEHMTYEVYKYAARGLYEEHKFLFTLLLTLKIDIQRNRVKHEEFLTLIKGGASLDLKACPPKPSKWILDITWLNLVELSKLRQFSDVLDQISRNEKMWKIWFDKENPEEEPLPNAYDKSLDCFRRLLLIRSWCPDRTIAQARKYIVDSMGEKYAEGVILDLEKTWEESDPRTPLICLLSMGSDPTDSIIALGKRLKIETRYVSMGQGQEVHARKLLQQTMANGGWALLQNCHLGLDFMDELMDIIIETELVHDAFRLWMTTEVHKQFPITLLQMSIKFANDPPQGLRAGLKRTYSGVSQDLLDVSSGSQWKPMLYAVAFLHSTVQERRKFGALGWNIPYEFNQADFNATVQFIQNHLDDMDVKKGVSWTTIRYMIGEIQYGGRVTDDYDKRLLNTFAKVWFSENMFGPDFSFYQGYNIPKCSTVDNYLQYIQSLPAYDSPEVFGLHPNADITYQSKLAKDVLDTILGIQPKDTSGGGDETREAVVARLADDMLEKLPPDYVPFEVKERLQKMGPFQPMNIFLRQEIDRMQRVLSLVRSTLTELKLAIDGTIIMSENLRDALDCMFDARIPAWWKKASWISSTLGFWFTELIERNSQFTSWVFNGRPHCFWMTGFFNPQGFLTAMRQEITRANKGWALDNMVLCNEVTKWMKDDISAPPTEGVYVYGLYLEGAGWDKRNMKLIESKPKVLFELMPVIRIYAENNTLRDPRFYSCPIYKKPVRTDLNYIAAVDLRTAQTPEHWVLRGVALLCDVK

SEQ ID NO: 3787 - protein, 230 aa, Homo sapiens
MEGGPAVCCQDPRAELVERVAAIDVTHLEEADGGPEPTRNGVDPPPRARAASVIPGSTSRLLPARPSLSARKLSLQERPAGSYLEAQAGPYATGPASHISPRAWRRPTIESHHVAISDAEDCVQLNQYKLQSEIGKGAYGVVRLAYNESEDRHYAMKVLSKKKLLKQYGFPRRPPPRGSQAAQGGPAKQLLPLERVYQEIAILKKLDHVNVVKLIEVLDDPAEDNLYLGE

SEQ ID NO: 3788 - protein, 244 aa, Homo sapiens [sequence omitted]

SEQ ID NO: 3789 - protein, 209 aa, Homo sapiens [sequence omitted]

SEQ ID NO: 3790 - protein, 320 aa, Homo sapiens [sequence omitted]

SEQ ID NO: 3791 - protein, 130 aa, Homo sapiens
MQVALWGDKIPQWRVVPNAVESQRRGRHLLRDVWEAPQRRWCWSRAWKDQAESWGKAFHLARAGGSSSTELFPVQVALKGNKEFHAIHRITDGEEAGEGDERGRGPEPSSWQWEGKRRRWTQHCVGCFFF

SEQ ID NO: 3792 - protein, 808 aa, Homo sapiens [sequence omitted]

SEQ ID NO: 3793 - protein, 625 aa, Homo sapiens
MRNGSGNWLADQIRRNRVVEGPGTPSKGQRWCTLHTEFLWYDGSLKSVPPPDFGTPTLHYFEDWGVVTYGSALPAEINRSFLSFKSGKLGGRAIYDIVHRNKYKDWIKGWRNFNAGHEHPDQNSFTFAPNGVPFITEALYGPKYTFFNNVLMFSPAVSKSCFSPWVGQVTEDCSSKWSKYKHDLAASCQGRVVAAEEKNGVVFIRGEGVGAYNPQLNLKNVQRNLILLHPQLLLLVDQIHLGEESPLETAASFFHNVDVPFEETVVDGVHGAFIRQRDGLYKMYWMDDTGYSEKATFASVTYPRGYPYNGTNYVNVTMHLRSPITRAAYLFIGPSIDVQSFTVHGDSQQLDVFIATSKHAYATYLWTGEATGQSAFAQVIADRHKILFDRNSAIKSSIVPEVKDYAAIVEQNLQHFKPVFQLLEKQILSRVRNTASFRKTAERLLRFSDKRQTEEAIDRIFAISQQQQQQSKSKKNRRAGKRYKFVDAVPDIFAQIEVNEKKIRQKAQILAQKELPIDEDEEMKDLLDFADVTYEKHKNGGLIKGRFGQARMVTTTHSRAPSLSASYTRLFLILNIAIFFVMLAMQLTYFQRAQSLHGQRCLYAVLLIDSCILLWLYSSCSQSQC

SEQ ID NO: 3794 - protein, 252 aa, Homo sapiens
MAGLHSSDKVGPKFSIPSPTFSKSSSAISEVTQPPSYEDAVKQQMTRSQQMDELLDVLIESGEMPADAREDHSCLQKVPKIPRSSRSPTAVLTKPSASFEQASSGSQIPFDPYATDSDEHLEVLLNSQSPLGKMSDVTLLKIGSEEPHFDGIMDGFSGKAAEDLFNAHEILPGPLSPMQTQFSPSSVDSNGLQLSFTESPWETMEWLDLTPPNSTPGFSALTTSSPSIFNIDFLDVTDLNLNSSMDLHLQQW

SEQ ID NO: 3795 - protein, 311 aa, Homo sapiens
MTRNAVWALSNLCRGKNPPPEFAKVSPCLPVLSRLLFSSDSDLLADACWALSYLSDGPNEKIQAVIDSGVCRRLVELLMHNDYKVASPALRAVGNIVTGDDIQTQVILNCSALPCLLHLLSSPKESIRKEACWTISNITAGNRAQIQAVIDANIFPVLIEILQKAEFRTRKEAAWAITNATSGGTPEQIRYLVSLGCIKPLCDLLTVMDSKIVQVALNGLENILRLGEQEGKRSGSGVNPYCGLIEEAYGLDKIEFLQSHENQEIYQKAFDLIEHYFGVEDDDSSLAPQVDETQQQFIFQQPEAPMEGFQL

SEQ ID NO: 3796 - protein, 221 aa, Homo sapiens
MWILLFQLSSALCFRMTISVGYFGLSLDTPNLHGDIFVNCFLSAMVEVPAYVLAWLLLQYLPRRYSMATALFLGGSVLLFMQLVPPDLYYLATVLVMVGKFGVTAAFSMVYVYTAELYPTVVRNMGVGVSSTASRLGSILSPYFVYLGAYDRFLPYILMGSLTILTAILTLFLPESFGTPLPDTIDQMLRVKGMKHRKTPSHTRMLKDGQERPTILKSTAF

SEQ ID NO: 3797 - protein, 101 aa, Homo sapiens
MHCTPSCHRALAPAACTALPLAPLSDQLPLILQISAWMSPPEGRCACLPRQSRCCHLLTESGFLPQSTPVSICLTLSLHLDCKVRESRDHTHLCSLGTYSL

SEQ ID NO: 3798 - protein, 258 aa, Homo sapiens
MYYAVEILFNRQSAFFSAVPNMPQQRQDQHHQSAMMHPASAAGPPIAATPPAYSTQYVAYSPQQFPNQPLVQHVPHYQSQHPHVYSPVIQGNARMMAPPTHAQPGLVSSSATQYGAHEQTHAMYVSTGSLAQQYAHPNATLHPHTPHPQPSATPTGQQQSQHGGSHPAPSPVQHHQHQAAQALHLASPQQQSAIYHAGLAPTPPSMTPASNTQSPQNSFPAAQQTVFTIHPSHVQPAYTNPPHMAHVPQVIPALANFL

SEQ ID NO: 3799 - protein, 531 aa, Homo sapiens [sequence omitted]

SEQ ID NO: 3800 - protein, 516 aa, Homo sapiens [sequence omitted]

SEQ ID NO: 3801 - protein, 133 aa, Homo sapiens [sequence omitted]

SEQ ID NO: 3802 - protein, 1372 aa, Homo sapiens
MGHLWLLGIWGLCGLLLCAADPSTDGSQIIPKVTEIIPKYGSINGATRLTIRGEGFSQANQFNYGVDNAELGNSVQLISSFQSITCDVEKDASHSTQITCYTRAMPEDSYTVRVSVDGVPVTENNTCKGHINSWECTFNAKSFRTPTIRSITPLSGTPGTLITIQGRIFTDVYGSNIALSSNGKNVRILRVYIGGMPCELLIPQSDNLYGLKLDHPNGDMGSMVCKTTGTFIGHHNVSFILDNDYGRSFPQKMAYFVSSLNKIAMFQTYAEVTMIFPSQGSIRGGTTLTISGRFFDQTDFPVRVLVGGEPCDILNVTENSICCKTPPKPHILKTVYPGGRGLKLEVWNNSRPIRLEEILEYNEKTPGYMGASWVDSASYIWLMEQDTFVARFSGFLVAPDSDVYRFYIKGDDRYAIYFSQTGLPEDKVRIAYHSANANSYFSSPTQRSDDIHLQKGKEYYIEILLQEYRLSAFVDVGLYQYRNVYTEQQTGDAVNEEQVIKSQSTILQEVQVITLENWETTNAINEVQKIKVTSPCVEANSCSLYQYRLIYNMEKTVFLPADASEFILQSALNDLWSIKPDTVQVIRTQNPQSYVYMVTFISTRGDFDLLGYEVVEGNNVTLDITEQTKGKPNLETFTLNWDGIASKPLTLWSSEAEFQGAVEEMVSTKCPPQIANFEEGFVVKYFRDYETDFNLEHINRGQKTAETDAYCGRYSLKNPAVLFDSADVKPNRRPYGDILLFPYNQLCLAYKGFLANYIGLKFQYQDNSKITRSTDTQFTYNFAYGNNWTYTCIDLLDLVRTKYTGTNVSLQRISLHKASESQSFYVDVVYIGHTSTISTLDEMPKRRLPALANKGIFLEHFQVNQTKTNGPTMTNQYSVTMTSYNCSYNIPMMAVSFGQIITHETENEFVYRGNNWPGESKIHTQRIQAASPPLSGSFDIQAYGHILKGKSLSQPTPPPMPILSQSEAKNPRINQLSARWQQVWLLALERQRKLNDALDRLEELKEFANFDFDVWRKKYMRWMNHKKSRVMDFFRRIDKDQDGKITRQEFIDGILASKFPTTKLEMTAVADIFDRDGDGYIDYYEFVAALHPNKDAYRPTTDADKIEDEVTRQVAQCKCAKRFQVEQIGENKYRFGDSQQLRLVRILRSTVMVRVGGGWMALDEFLVKNDPCRARGRTNIELREKFILPEGASQGMTPFRSRGRRSKPSSRAASPTRSSSSASQSNHSCTSMPSSPATPASGTKVIPSSGSKLKRPTPTFHSSRTSLAGDTSNSSSPASTGAKTNRADPKKSASRPGSRAGSRAGSRASSRRGSDASDFDLLETQSACSDTSESSAAGGQGNSRRGLNKPSKIPTMSKKTTTASPRTPGPKR

SEQ ID NO: 3803 - protein, 211 aa, Homo sapiens
MCSLPRGFEPQAPEDLAQRSLVELREMLKRQERLLRNELQRITIADQGEQQSEENASTKNLTGLSSGTEKKPHYMEVLEMRAKNPVPQLRKFKTNVLPFRQNDSSSHCQKSGSPISSEERRRRDKQHLDDITAARLLPLHHMPTQLLSIEESLALQKQQKQNYEEMQAKLAAQKLAERLNIKMRSYNPEGESSGRYREVRDEDDDWSSDEF

SEQ ID NO: 3804 - protein, 118 aa, Homo sapiens
MHVLRPSLFLSMGQRPLGLFTVGRIYNLPLFSVVTRFKAKHMTRLTAISLTHTPVIFTCIRNGLAPSSTPIICTCISNELAVLERQSLLTFPTCTSPRLFNKEAGGRHYPIRSFSRLV

SEQ ID NO: 3805 - protein, 252 aa, Homo sapiens [sequence omitted]

SEQ ID NO: 3806 - protein, 136 aa, Homo sapiens [sequence omitted]

SEQ ID NO: 3807 - protein, 450 aa, Homo sapiens
MEDPSEPDRLASADGGSPEEEEDGEREPLLPRIAWAHPRRGAPGSAVRLLDRSRPAVSVTIGTSEMNAFLDDPEFADIMLRAEQAIEVGIFPERISQGSSGSYFVKDPKRKIIGVFKPKSEEPYGQLNPKWTKYVHKVCCPCCFGRGCLIPNQGYLSEAGAYLVDNKLHLSIVPKTKVVWLVSETFNYNAIDRAKSRGKKYALEKVPKVGRKFHRIGLPPKIGSFQLFVEGYKEAEYWLRKFEADPLPENIRKQFQSQFERLVILDYIIRNTDRGNDNWLVRYEKQKCEKEIDHKESKWIDDEEFLIKIAAIDNGLAFPFKHPDEWRAYPFHWAWLPQAKVPFSEEIRNLILPYISDMNFVQDLCEDLYELFKTDKGFDKATFESQMSVMRGQILNLTQALRDGKSPFQLVQIPCVIVERSQGGSQGRIVHLSNSFTQTVNCRKPFFSSW

SEQ ID NO: 3808 - protein, 134 aa, Homo sapiens
MWVYSVKSFGLWWYQAYRSPHPDPGRGVDWSRGTLMGPGRDDRRSVSLPFSLKFPASMAGSQHELRPLQESLPFCSRPPPRCQAGSTNQKRSWAGAAVQRANRRAVGAGLARACGSCRLSGRHVQTGRDTRGFR

SEQ ID NO: 3809 - protein, 595 aa, Homo sapiens
MMAADIPRVTTPLSSLVQVPQEEDRQEEEVTTMILEDDSWVQEAVLQEEVTRGPQGALGRLRELCRRWLRPEVHTKEQMLTMLPKEIQAWLQEHRPESSEEAAALVEDLTQTLQDSDFEIQSENGENCNQDMFENESRKIFSEMPEGESAQHSDGESDFERDAGIQRLQGHTPGEDHGEVVSQDREVGQLIGLQGTYLGEKPYECPQCGKTFSRKSHLITHERTHTGEKYYKCDECGKSFSDGSNFSRHQTTHTGEKPYKCRDCGKSFSRSANLITHQRIHTGEKPFQCAECGKSFSRSPNLIAHQRTHTGEKPYSCPECGKSFGNRSSLNTHQGIHTGEKPYECKECGESFSYNSNLIRHQRIHTGEKPYKCTDCGQRFSQSSALITHRRTHTGEKPYQCSECGKSFSRSSNLATHRRTHMVEKPYKCGVCGKSFSQSSSLIAHQGMHTGEKPYECLTCGESFSWSSNLLKHQRIHTGEKPYKCSECGKCFSQRSQLVVHQRTHTGEKPYKCLMCGKSFSRGSILVMHQRAHLGDKPYRCPECGKGFSWNSVLIIHQRIHTGEKPYKCPECGKGFSNSSNFITHQRTHMKEKLY

SEQ ID NO: 3810 - protein, 534 aa, Homo sapiens [sequence omitted]

SEQ ID NO: 3811 - protein, 101 aa, Homo sapiens
MGGTEVPRGSFVLGVQLKAVDGEAILSLCVDSGLSDTSPDEGLIEDLTIEDKAVEQLAEGLLSHYLPDLQRSKQALQELTTAAVDCTCLKLKKAKLQIKED

SEQ ID NO: 3812 - protein, 938 aa, Homo sapiens [sequence omitted]

SEQ ID NO: 3813 - protein, 661 aa, Homo sapiens [sequence omitted]

SEQ ID NO: 3814 - protein, 106 aa, Homo sapiens [sequence omitted]

SEQ ID NO: 3815 - protein, 544 aa, Homo sapiens
MAFQDHPEKSEQFEELQSILKKGKLTFENIMEKLRIKYSEMYTIVPAEIESQVEECRKALEDIDEKISNEVLKSSPSYAMRRKIEEINNGLHNVEKMLQQKSKNIEKAQEIQKKMWDELDLWHSKLNELDSEVQDIVEQDPGQAQEWMDNLMIPFQQYQQVSQRAECRTSQLNKATVKMEEYSDLLKSTEAWIENTSHLLANPADYDSLRTLSHHASTVQMALEDSEQKHNLLHSIFTDLEDLSIIFETDELTQSIQELSNQVTALQQKIMESLPQIQRMADDVVAIESEVKSMEKRVSKIKTILLSKEIFDFSPEEHLKHGEVILENIRPMKKTIAEIVSYQVELRLPQTGMKPLPVFQRTNQLLQDIKLLENVTQEQNELLKVVIKQTNEWDEEIENLKQILNNYSAQFSLEHMSPDQADKLPQLQGEIERMEKQILSLNQRKEDLLVDLKATVLNLHQHLKQEQEGVERDRLPAVTSEEGGVAERDASERKLNRRGSMSYLAAVEEEVEESSVKSDVREMIFLLKFVRTRSLKEVNEKILK

SEQ ID NO: 3816 - protein, 1283 aa, Homo sapiens
MLYKKFSLKFVSARKKAAPRKTGAQAGILDTVCNGFQLVQVFQKEEIEPLQGKQQDVNWLGQGLIQSAAKSTSTQGLEHDLDDVNARWKTLNKKVAQRAAQLQEALLHCGRFQDALESLLSWMVDTEELVANQKPPSAEFKVVKAQIQEQKLLQRLLDDRKSTVEVIKREGEKIATTAEPADKVKILKQLSLLDSRWEALLNKAETRNRQLEGISVVAQQFHETLEPLNEWLTTIEKRLVNCEPIGTQASKLEEQIAQHKALEDDIINHNKHLHQAVSIGQSLKVLSSREDKDMVQSKLDFSQVWYIEIQEKSHSRSELLQQALCNAKIFGEDEVELMNWLNEVHDKLSKLSVQDYSTEGLWKQQSELRVLQEDILLRKQNVDQALLNGLELLKQTTGDEVLIIQDKLEAIKARYKDITKLSTDVAKTLEQALQLARRLHSTHEELCTWLDKVEVELLSYETQVLKGEEASQAQMRPKELKKEAKNNKALLDSLNEVSSALLELVPWRAREGLEKMVAEDNERYRLVSDTITQKVEEIDAAILRSQQFDQAADAELSWITETEKKLMSLGDIRLEQDQTSAQLQVQKTFTMEILRHKDIIDDLVKSGHKIMTACSEEEKQSMKKKLDKVLKNYDTICQINSERYLQLERAQSLVNQFWETYEELWPWLTETQSIISQLPAPALEYETLRQQQEEHRQLRELIAEHKPHIDKMNKTGPQLLELSPGEGFSIQEKYVAADTLYSQIKEDVKKRAVALDEAISQSTQFHDKIDQILESLERIVERLRQPPSISAEVEKIKEQISENKNVSVDMEKLQPLYETLKQRGEEMIARSGGTDKDISAKAVQDKLNQMVFIWENIHTLVEEREAKLLDVMELAEKFWCDHMSLIVTIKDTQDFIRDLEDPGIDPSVVKQQQEAAETIREEIDGLQEELDIVINLGSELIAACGEPDKPIVKKSIDELNSAWDSLNKAWKDRIDKLEEAMQAAVQYQDGLQAVFDWVDIAGGKLASMSPIGTDLETVKQQIEELKQFKSEAYQQQIEMERLNHQAELLLKKVTEESDKHTVQDPLMELKLIWDSLEERIINRQHKLEGALLALGQFQHALDELLAWLTHTEGLLSEQKPVGGDPKAIEIELAKHHVLQNDVLAHQSTVEAVNKAGNDLIESSAGEEASNLQNKLEVLNQRWQNVLEKTEQRKQQLDGALRQAKGFHGEIEDLQQWLTDTERHLLASKPLGGLPETAKEQLNVHMEVCAAFEAKEETYKSLMQKGQQMLARCPKSAETNIDQD

SEQ ID NO: 3817 - protein, 126 aa, Homo sapiens
MISFHVIFLSLGRGKLFLPVNFCFLKLKNSQVRIPKDFTCNLHVLFRTVQGEDRNTMFRGHWSIYSRNFPLAVVPAYVTEDGKNTSHRASGQFCNALSQGEIPSSLQLVNSYALEPRTDMPCNFLT

SEQ ID NO: 3818 - protein, 123 aa, Homo sapiens [sequence omitted]

SEQ ID NO: 3819 - protein, 538 aa, Homo sapiens [sequence omitted]

SEQ ID NO: 3820 - protein, 1042 aa, Homo sapiens [sequence omitted]

SEQ ID NO: 3821 - protein, 287 aa, Homo sapiens
MANRLFGEKSCDFLSSFRDSCQKFYQAEMEELDFISAVEKSRKHINTWVAEKTEGKIAELLSPGSVDPLTRLVLVNAVYFRGNWDEQFDKENTEERLFKVSKNEEKPVQMMFKQSTFKKTYIGEIFTQILVLPYVGKELNMIIMLPDETTDLRTVEKELTYEKFVEWTRLDMMDEEEVEVSLPRFKLEESYDMESVLRNLGMTDAFELGKADFSGMSQTDLSLSKVVHKSFVEVNEEGTEAAAATAAIMMMRCARFVPRFCADHPFLFFIQHSKTNGILFCGRFSSP

SEQ ID NO: 3822 - protein, 145 aa, Homo sapiens [sequence omitted]

SEQ ID NO: 3823 - protein, 405 aa, Homo sapiens [sequence omitted]

SEQ ID NO: 3824 - protein, 410 aa, Homo sapiens
MVELAIIGSDMQEVIGSAIAINLLSVGRIPLWGGVLITIADTFVFLFLDKYGLRKLEAFFGFLITIMALTFGYEYVTVKPSQSQVLKGMFVPSCSGCRTPQIEQAVGIVGAVIMPHNMYLHSALVKSRQVNRNNKQEVREANKYFFIESCIALFVSFIINVFVVSVFAEAFFGKTNEQVVEVCTNTSSPHAGLFPKDNSTLAVDIYKGGVVLGCYFGPAALYIWAVGILAAGQSSTMTGTYSGQFVMEGFLNLKWSRFARVVLTRSIAIIPTLLVAVFQDVEHLTGMNDFLNVLQSLQLPFALIPILTFTSLRPVMSDFANGLGWRIAGGILVLIICSINMYFVVVYVRDLGHVALYVVAAVVSVAYLGFVFYLGWQCLIALGMSFLDCGHTVSISKGLLTEEATRGYVK

SEQ ID NO: 3825 - protein, 156 aa, Homo sapiens
MDQEEGLKALDNIVTQFNAYEDFLDSQITTVDLYYLEDETLARQLVELGYRGTGERVKREDFEARKAAIEIARLAERAQQKTLTSAGKDLQDNFLTALAMREEDNRSGKLSAGVQWHHLGSLQPLPPGFKEFSCFSLPSGWDYRHAPPHPVRDLYS

SEQ ID NO: 3826 - protein, 337 aa, Homo sapiens
MYAMNLARYKYCPDIKEKGLSGSPRLILFTSAECHYSMKKAASFLGIGTENVCFVETDGRGKMIPEELEKQVWQARKEGAAPFLVCATSGTTVLGAFDPLDEIADICERHSLWLHVDASWGGSALMSRKHRKLLHGIHRADSVAWNPHKMLMAGIQCCALLVKDKSDLLKKCYSAKASYLFQQDKFYDVSYDTGDKSIQCSRRPDAFKFWMTWKALGTLGLEERVNRALALSRYLVDEIKKREGFKLLMEPEYANICFWYIPPSLREMEEGPEFWAKLNLVAPAIKERMMKKGSLMLGYQPHRGKVNFFRQVVISPQVSREDMDFLLDEIDLLGKDM

SEQ ID NO: 3827 - protein, 107 aa, Homo sapiens
MSHPSFLLFFCFFLFLFFEKQFHSCCPNWSGVQWRDLGSLQPPPPGFKRFSCLNLPSSWDYRCLPPRLANFVFLVETGFLHVGQAGLELPTSGDRLPQPPKVVGLQV

SEQ ID NO: 3828 - protein, 318 aa, Homo sapiens
MIKLWTNRDLHIIVMVKNPAKMSLYPSLEDLKVDKVIQAQTAFSANPANPAILSEASAPIPHDGNLYPRLYPELSQYMGLSLNEEEIRANVAVVSGAPLQGLVARPSSINYMVAPVTGNDVGIRRAEIKQGIREVILCKDQDGKIGLRLKSIDNGIFVQLVQANSPASLVGLRFGDQVLQINGENCAGWSSDKAHKVLKQAFGEKITMTIRDRPFERTITMHKDSTGHVGFIFKNGKITSIVKDSSAARNGLLTEHNICEINGQNVIGLKDSQIADILSTSGTVVTITIMPAFIFEHIIKRMAPSIMKSLMDHTIPEV

SEQ ID NO: 3829 - protein, 161 aa, Homo sapiens
MRGSCERSGEDEEQKEEAMVACGRLSGVPEAEQGPEANWDSDLETEGTDGLGELVRDTLYLRSCRAHSVVPISCFLRQGSAQELNLRHRGLGPQGARALASSLSSNPYVKRLDLRDNGLCGAGAEALAGALSKSSSIHGRCWVWGRWAGVSSFSSGMCLHR

SEQ ID NO: 3830 - protein, 598 aa, Homo sapiens [sequence omitted]

SEQ ID NO: 3831 - protein, 1662 aa, Homo sapiens
MLLSIQRNLAAAWYVQIPGMEIKGKLKPMQVALSEDDLTVLMKILLENLGEASSQPSPTQSVQETVRVRKVDVSSVPDHLKEQEDWTDSKLSMNQIVSLQFDFHFESLSIILYNNDINQESGVAFHNDSFQLGELRLHLMASSGKMFKDGSMNVSVKLKTCTLDDLREGIERATSRMIDRKNDQDNNSSMIDISYKQDKNGSQIDAVLDKLYVCASVEFLMTVADFFIKAVPQSPENVAKETQILPRQTATGKVKIEKDDSVRPNMTLKAMITDPGVVFVASLTKADAPALTASFQCNLSLSTSKLEQMMEASVRDLKVLACPFLREKRGKNITTVLQPRSLFMEKCTWASGKQNINIMVKEFIIKISPIILNTVLTIMAALSPKTKEDGSKDTSKEMENLWGIKSINDYNTWFLGVDTATEITESFKGIEHSLIEENCGVVVESIQVTLECGLGHRTVPLLLAESKFSGNIKNWTSLMAAVADVTLQVHYYNEIHAVWEPLIERVEGKRQWNLRLDVKKNPVQDKSLLPGDDFIPEPQMAIHISSGNTMNITISKSCLNVFNNLAKGFSEGTASTFDYSLKDRAPFTVKNAVGVPIKVKPNCNLRVMGFPEKSDIFDVDAGQNLELEYASMVPSSQGNLSILSRQESSFFTLTIVPHGYTEVANIPVARPGRRLYNVRNPNASHSDSVLVQIDATEGNKVITLRSPLQIKNHFSIAFIIYKFVKNVKLLERIGIARPEEEFHVPLDSYRCQLFIQPAGILEHQYKESTTYISWKEELHRSREVRCMLQCPSVEVSFLPLIVNTVALPDELSYICTHGEDWDVAYIIHLYPSLTLRNLLPYSLRYLLEGTAETHELAEGSTADVLHSRISGEIMELVLVKYQGKNWNGHFRIRDTLPEFFPVCFSSDSTEVTTVDLSVHVRRIGSRMVLSVFSPYWLINKTTRVLQYRSEDIHVKHPADFRDIILFSFKKKNIFTKNKVQLKISTSAWSSSFSLDTVGSYGCVKCPANNMEYLVGVSIKMSSFNLSRIVTLTPFCTIANKSSLELEVGEIASDGSMPTNKWNYIASSECLPFWPENLSGKLCVRVVGCEGSSKPFFYNRQDNGTLLSLEDLNGGILVDVNTAEHSTVITFSDYHEGSAPALIMNHTPWDILTYKQSGSPEEMVLLPRQARLFAWADPTGTRKLTWTYAANVGEHDLLKDGCGQFPYDANIQIHWVSFLDGRQRVLLFTDDVALVSKALQAEEMEQADYEITLSLHSLGLSLVNNESKQEVSYIGITSSGVVWEVKPKQKWKPFSQKQIILLEQSYQKHQISRDHGWIKLDNNFEVNFDKDPMEMRLPIRSPIKRDFLSGIQIEFKQSSHQRSLRARLYWLQVDNQLPGAMFPVVFHPVAPPKSIALDSEPKPFIDVSVITRFNEYSKVLQFKYFMVLIQEMALKIDQGFLGAIIALFTPTTDPEAERRRTKLIQQDIDALNAELMETSMTDMSILSFFEHFHISPVKLHLSLSLGSGGEESDKEKQEMFAVHSVNLLLKSIGATLTDVDDLIFKLAYYEIRYQFYKRDQLIWSVVRHYSEQFLKQMYVLVLGLDVLGNPFGLIRGLSEGVEALFYEPFQGAVQGPEEFAEGLVIGVRSLFGHTVGGAAGVVSRITGSVGKGLAAITMDKEYQ

SEQ ID NO: 3832 - protein, 1054 aa, Homo sapiens
MARDTNSGSSSSQQNYGLRAKRKVRYSEDYLYDVDSLEGEKVNERKEWLPVGSKEEDDDEWCPKKRRKVTRKEPPVIIKYIIINRFKGEKNMLVKLGKVDASETTVNLSENQLNKYAKLAPLKGFWQKKKKQRNTNTDSIKTPFSQKQSFEPGSFEVSFLPPARKRKSKLGNRHRIQRIPSIEISASSKQISLCNDQRHASNHKEDGGLKGTLKSAPLGAPSCANGSHLNDITGPDSVKVKAQDTEFKGPERKVLNKIKFKSEARLKSKKVKAAGQESKPIVQMSPLLENQSSKANLKNEVIPGTSNSSRLSEFHEAKAAKSSTFLPTTCSSEMPLSSANVTTNIPVIPGGYLQTLLDASDLSNNTSISYFSHHSPEQNEGSLTQTEKSFVPLQPTQDCVLTSSSDSELQQSSHNFKMESSNYRNVWPNKATSGTQEFMAEVSREIAPTQSSEFGASQVVSMENNLTPTTYNPICLNSGGSNCNKVLYDSMQDTQLPSDDSYQLCHFNNGEICFPFQQGPVNMDDGRLFSFDSMAPLSVSSSNYCSLSLKSCEKDGDDDITDDFLAHCSPKLVIQQSIDEIAPLKESTDLLDISNFTPDKFRHSSLSEMSPPDTPSLSPQITRCESMKTLGTLKGFQEGVPGPLDSVEKIKWDCSTLSRQVQMEDGFTLNNHQFQFHMFNDEDSVSLLQKNPCLSTFNDPSGQISTNNKVSKSRKKSSPSKSGAMNQSSSQKNTRKKSLKGNNKGIEKPPGKNSRQVPKSTKKGKYMAAINGEKMQIGIGRGGSQTNTISSTGKTLAECIQHGGPMASMKMPSQKGLSGDWALGKESSPGWSDMSMGTNTNSLLDDDQREFQEPSYILSNIASGMADVQRFMMASIEPLWEPMEHHGDPNIFYSPESNSLKLKTLKILAGTPQESKKKINSGSQGATKNHRSIKGVSKSNGKTAIGDPGRANMPGYNEDSRSTFFDKKYSNMSTLGNNGPTHKKLYRHKSSSKALRDEKCKGKHMEREQVHKDESGTASFEKLRDSDYNLLKAETTFWVLPVFEEETRIFQKDI

SEQ ID NO: 3833 - protein, 158 aa, Homo sapiens [sequence omitted]

SEQ ID NO: 3834 - protein, 150 aa, Homo sapiens
MASERLPNRPACLLVASGAAEGVSAQSFLHCFTMASTAFNLQVATPGGKAMEFVDVTESNARWVQDFRLKAYASPAKLESIDEPICAVGHGVAALCCATNEDRSWVFDSYSLTGGLGLSQEPPPRSRSPLCVSSSGPPASPACRSWWRTS

SEQ ID NO: 3835 - protein, 568 aa, Homo sapiens
MAQVDSQDRWGEASPLSSLTEEAHDTQMLSMNLESDDEDGGEAEKEGTADPVACPRGSSPVTHENPDLPWPHPLGKEEEKFSDSSSAGGMGQKPVEMSGKASWSRDVTKINETQGSPGASRALGSLPSGLAHKLLGQMQPLGDRLPAGDDGYSGANQDAVLDVPPSFPSNGKYLCAHKSVDTSAGNSSLLCFPRPGSNWDLPTQETHTPAQASATPASLAAAVLAKARNSRKVQNQAGRREGGEAEARPYRCLRGGRAFQKPSKPLSPAETRGGAAKRYACELCGKAYSHRGTLQQHRRLHTGERPYQCSFCDKAYTWSSDHRKHIRTHTGEKPYPCPDCGKAFVRSSDLRKHQRNMHSNNKPFPCSECGLTFNKPLSLLRHQRTHLGAKPFRCPACDREFAVASRMVEHQRVHSGERPFPCPTCGKCFTKSSNLSEHQTLHTGQRPFKCADCGVAFAQPSRLVRHQRIHTGERPFPCTQCGQAFARSSTLKRHQQIHSGEKGFLCAECGRAFRIASELAQHIRMHNGERPYQCEDCGQAFTRSNHLQRHRAKHGTCKKEPIPSSSDE

SEQ ID NO: 3836 - protein, 115 aa, Homo sapiens [sequence omitted]

SEQ ID NO: 3837 - protein, 253 aa, Homo sapiens [sequence omitted]

SEQ ID NO: 3838 - protein, 191 aa, Homo sapiens
MKSFITPGMLNSPTLCQHFVGKALKEPRNMFSTTYIIHYMDNIVLATPTDQVLYQLFREIKWALTKWNLKIAPEKVQTTSSYQYLDTTVTEKSIQPQKVALRKNKLQTLNNLGDINWLRPMLGIASYQLTHVYQTLQGDSSLDSPRQLTKEAEAELQLVERCFSNDMPPGYNHKSLWFCLFFLPPILHQDF

SEQ ID NO: 3839 - protein, 537 aa, Homo sapiens [sequence omitted]

SEQ ID NO: 3840 - protein, 965 aa, Homo sapiens
MIIPSLDGALFQWDRDRESMETVPFTVESLLESSYKFGDDVVLVGGKSLTTYGLSAYSGKVRYICSALGCRQWDSDEMEQEEDILLLQRTQKTVRAVGPRSGNEKWNFSVGHFELRYIPDMETRAGFIESTFKPNENTEESKIISDVEEQEAAIMDIVIKVSVADWKVMAFSKKGGHLEWEYQFCTPIASAWLLKDGKVIPISLFDDTSYTSNDDVLEDEEDIVEAARGATENSVYLGMYRGQLYLQSSVRISEKFPSSPKALESVTNENAIIPLPTIKWKPLIHSPSRTPVLVGSDEFDKCLSNDKFSHEEYSNGALSILQYPYDNGYYLPYYKRERNKRSTQITVRFLDNPHYNKNIRKKDPVLLLHWWKEIVATILFCIIATTFIVRRLFHPHPHRQRKESETQCQTENKYDSVSGEANDSSWNDIKNSGYISRYLTDFEPIQCLGRGGFGVVFEAKNKVDDCNYAIKRIRLPNRELAREKVMREVKALAKLEHPGIVRYFNAWLEAPPEKWQEKMDEIWLKDESTDWPLSSPSPMDAPSVKIRRMDPFSTKEHIEIIAPSPQRSRSFSVGISCDQTSSSESQFSPLEFSGMDHEDISESVDAAYNLQDSCLTDCDVEDGTMDGNDEGHSFELCPSEASPYVRSRERTSSSIVFEDSGCDNASSKEEPKTNRLHIGNHCANKLTAFKPTSSKSSSEATLSISPPRPTTLSLDLTKNTTEKLQPSSPKVYLYIQMQLCRKENLKDWMNGRCTIEERERSVCLHIFLQIAEAVEFLHSKGLMHRDLKPSNIFFTMDDVVKVGDFGLVTAMDQDEEEQTVLTPMPAYARHTGQVGTKLYMSPEQIHGNSYSHKVDIFSLGLILFELLYPFSTQMERVRTLTDVRNLKFPPLFTQKYPCEYVMVQDMLSPSPMERPEAINIIENAVFEDLDFPGKTVLRQRSRSLSSSGTKHSRQSNNSHSPLPSN

SEQ ID NO: 3841 - protein, 453 aa, Homo sapiens
METRGPGLAVRAESRRLVGIGPRAPPGRVGLQPSGRLDRRGGAGTMGYKDNDGEEEEREGGAAGPRGSRLPPITGGASELAKRKVKKKKRKKKTKGSGKGDDKHQSQSLKSQPLSSSFHDILSPCKERGPKPEHRQSKVEKKHLPSDSSTVSLPDFAEIENLANRINESLRWDGILADPEAEKERIRIYKLNRRKRYRCLALKGFHPDPEALKGFHPDPEALKGFHPDPEALKGFHPDPEALKGFHPDPEALKGFHPDPEALKGIHPDPEALKGIHPDPEALKGFHPDPEALKGFHPDPEALKGFHTDPEALKGFHIDPEALKGFHPDPKALKGFHPDPKALKGFHTDPEALKGFHPDPKALKGFHPDPEALKGFHPDPEALKGFHPDPEALKGFHTDPNAEEAPENLPYLSDKDGSSSHRQPTSKAECPNLCFEGNLTPKLLHSDLAPTLLE

SEQ ID NO: 3842 - protein, 274 aa, Homo sapiens
MGLGKKGNLVYIIDFGLAKKYRDARTHQHIPYRENKNLTGTARYASINTHLGIEQSRRDDLESLGYVLMYFNLGSLPWQGLKAATKRQKYERISEKKMSTPIEVLCKGYPSEFATYLNFCRSLRFDDKPDYSYLRQLFRNLFHRQGFSYDYVFDWNMLKFGASRAADDAERERRDREERLRHSRNPATRGLPSTASGRLRGTQEVAPPTPLTPTSHTANTSPRPVSGMERERKVSMRLHRGAPVNISSSDLTGRQDTSRMSTSQNSIPFEHHGK

SEQ ID NO: 3843 - protein, 189 aa, Homo sapiens
MEVPTAYMISPKEREKASNLKLSSRPPATSHLIRTPKDTHYCGASKGLGNSFIGNESFLPEFINGDFDSIRPEVREYYATKGCELISTPDQDHTDFTKCLKMLQKKIEEKDLKGKHRLHVDTGMEGDWCGLIPVGQPCMQVTTTGLKWNLTNDVLAFGTLVSTSNTYDGSGVVTVETDHPLLWTMAIKS

SEQ ID NO: 3844 - protein, 127 aa, Homo sapiens
MYSDLGYVIHGRINVQFNNGEHGFDNKDMDMKTIFRAVGPSFRAGLEVEPFESVHVYELMCRLLGIVPEANDGHLATLLPMLHTESALPPDGRPTLLPKGRSALPPSSRPLLVMGLLGTVILLSEVA

SEQ ID NO: 3845 - protein, 279 aa, Homo sapiens
MQLGSSSPPPACGVQPPETTRPEPPPPLVPPLPAGSLPPYPPYFEGAPFPHPLWLRDTYKLWVPQPPPRTIKRTRRRLSRNRDPGRLILSTIRLRPRQVLCEKCKSTLSPPEASPGPPAAPRARRRLGSGPDRELRKPEEPENGEPTAAATARRSKRERREEDRAPAEQVPRSPVIKISYSTPQGKGEVVKIPSRVHGSLEPFRPQQAPQDDGSQDPEVLDRESRDRPSCAPSASIPKLKLTRPVPAGADLPPPKIRLKPHRLGTASTSPCTGPSWWGS

SEQ ID NO: 3846 - protein, 499 aa, Homo sapiens [sequence omitted]

SEQ ID NO: 3847 - protein, 247 aa, Homo sapiens
MFGDYDSFTENSFIAQVDDLEQKYMQLPEHKKHATDFATENLCSESIKNKLSITTIGNLTELQTDKHTENQSGYEGVTIEPGADLLYDVPSSQAIYFENLQNSSNDLGDHSMKERDWKSSSHNTVNEELPHNCIEQPQQNDESSSKVRTSSDMNRRKSIKDHLKNAMTGNAKAQTPIFSRSKQLKDTLLSEEINVAKKTIESSSNDLGPFYSLPSKVRDLYAQFKGIEKLYGNAFCWNKKIFFLSLP

SEQ ID NO: 3848 - protein, 167 aa, Homo sapiens [sequence omitted]

SEQ ID NO: 3849 - protein, 292 aa, Homo sapiens [sequence omitted]

SEQ ID NO: 3850 - protein, 215 aa, Homo sapiens
MEKNPPDDTGPVHVPLGHIVANEKWRGSQLAQEMQGKIKLIFEDGLTPDFYLSNRCCILYVTEADLVAGNGYRKRLVRVRNSNNLKGIVVVEKTRMSEQYFPALQKFTVLDLGMVLLPVASQMEASCLVIQLVQEQTKEPSKNPLLGKKRALLLSEPSLLRTVQQIPGVGKVKAPLLLQKFPSIQQLSNASIGELEQVVGQAVAQQIHAFFTQPR

SEQ ID NO: 3851 - protein, 163 aa, Homo sapiens
MLVWASPGGPRSCVALKEGLAPEDQLSPPPGGLYLLRVQSSQPHGLGPGHRDQSQKSSQQQAAHPPRSTLRRKPRMCSPSRPWRPVYMALNFSVFQNGHPKASRTTSPVPGDPRSPSPSLGSRETAVRCQARQEAKVKPKERNQGENKWFSGTAVLDIFCFNH

SEQ ID NO: 3852 - protein, 134 aa, Homo sapiens
MFDNGNFRRKRKRRAEASAAVRSGARSVGGAEAPALEPPSAACLDLQASPSPSAPEAATCFSGFASAMSALAGGLGTFPGGLAGDFSFGRRPPTVATHAPQTLNPSPGFAPGHQTAAAGFRLSHLLYSREGTEV

SEQ ID NO: 3853 - protein, 188 aa, Homo sapiens [sequence omitted]

SEQ ID NO: 3854 - protein, 146 aa, Homo sapiens
MDYVHTKNLIYQDVKPENFLVGRPGTKRQHAIHIIDLGLAKGYTGLRTKKHIPCSQHKSLTGTACYMSINMHLGKEQSHCNNLEVLGHMFMYFLCSSLPWQGLKADTIMSGTEDRGHIARHAHRSALRELPRGDGYVPALRAAPGL

SEQ ID NO: 3855 - protein, 178 aa, Homo sapiens
MVNVPDIFSHDTQGLLRKKLIEASFQKVILDGYGSCGPQNLNLRKEWESEGKCEGHNGYYDGHTKCKTTTYNKNLTVTGGQKHEKTQFMSVAFSKPCVSVSKCQHQFLKLTFSFKGNLDNPNSDLVHVSNNHLNQLKYRTGVNVQSNISEKERFKNEEVISKYDQFDGSLLKVCFTNK

SEQ ID NO: 3856 - protein, 141 aa, Homo sapiens [sequence omitted]

SEQ ID NO: 3857 - protein, 189 aa, Homo sapiens
MVQGSSRTARPLSAPACGLSPGPDCNASWQDRAADFCPVRAVCKVGPCPCCQLKTDPRLGKRTGLDLFSVWSRSAMLAPAGSVLAMPTLRPPRNSVGDSGACCLRTTGLDISKVLPESFLSCPLLELPWHLSSWVPNPGLPTLRTPHASYSCFAAQARSPERAAGGAWPLTGKPWPRTGILSPSHSEIL

SEQ ID NO: 3858 - protein, 121 aa, Homo sapiens
MIDSPRKEGALSPPLGGWRLGDRRCAGGKRTERRTPEKLWGIRGEKEGVKREGRLSRGGGAGAGAGAGGVTAPRPPLPALHSAAPGLPPPPPPPPPPPPLPPPPGVAGCGQNRSPNRAAGE

SEQ ID NO: 3859 - protein, 318 aa, Homo sapiens
MVLSSGPQWCGSQELWFGKTCEEKSRLGRWPGYLNGGRMESSTNDIIEVIVKDEMISVEESSGNTDVNNLLGIHHKILNEQIFYICEECGKCFDQNEDFDQHQKTHNGEKVYGCKECGKAFSFRSHCIAHQRIHSGVKPYECQECAKAFVWKSNLIRHQRIHTGEKPFECKECGKGFSQNTSLTQHQRIHTGEKPYTCKECGKSFTRNPALLRHQRMHTGEKPYECKDCGKGFMWNSDLSQHQRVHTGDKPHECTDCGKSFFCKAHLIRHQRIHTGERPYRCNDCGKAFSQNSVLIKHQRRHARDKPYNCQISHLLEH

SEQ ID NO: 3860 - protein, 1774 aa, Homo sapiens [sequence omitted]

SEQ ID NO: 3861 - protein, 780 aa, Homo sapiens [sequence omitted]

SEQ ID NO: 3862 - protein, 191 aa, Homo sapiens
MDEETEAQRGRVPCPRARIWRAQRNPGLCPQRAFQPLPFSGTWNPVDLQPGITGGGAVRAAMQPGGTETGEGDREEAQIWRGMVRPLGEGPWARPPHHRPCPCLPDVDECLEGLDDCHYNQLCENTPGGHRCSCPRGYRMQGPSLPCLGTGTPTLWPHRCSCPRGYRMQGPSLPCLVTGTPTLWPAPQLRG

SEQ ID NO: 3863 - protein, 867 aa, Homo sapiens [sequence omitted]

SEQ ID NO: 3864 - protein, 1714 aa, Homo sapiens
MNIKAPKISMPDFDLHLKGPKVKGDVDVSLPKMEGDLKAPEVDIKGPKVDIDAPDVDVHGPDWHLKMPKVKMPKFSMPGFKGEGPEVDVNLPKADIDVSGPKVDIDTPDIDIHGPEGKLKGPKFKMPDLHLKAPKISMPEVDLNLKGPKMKGDVDVSLPKVEGDLKGPEVDIKGPKVDIDVPDVDVQGPDWHLKMPKVKMPKFSMPGFKGEGPDVDVNLPKADLDVSGPKVDIDVPDVNIEGPDAKLKGPKFKMPEMNIKAPKISMPDFDLHLKGPKVKGDVDVSLPKVEGDLKGPEVDIKGPKVDIDAPDVDVHGPDWHLKMPKVKMPKFSMPGFKGEGPDVDVTLPKADIEISGPKVDIDAPDVSIEGPDAKLKGPKFKMPEMNIKAPKISMPDIDFNLKGPKVKGDVDVSLPKVEGDLKGPEIDIKGPSLDIDTPDVNIEGPEGKLKGPKFKMPEMNIKAPKISMPDFDLHLKGPKVKGDVDVSLPKVESDLKGPEVDIEGPEGKLKGPKFKMPDVHFKSPQISMSDIDLNLKGPKIKGDMDISVPKLEGDLKGPKVDVKGPKVGIDTPDIDIHGPEGKLKGPKFKMPDLHLKAPKISMPEVDLNLKGPKVKGDMDISLPKVEGDLKGPEVDIRDPKVDIDVPDVDVQGPDWHLKMPKVKMPKFSMPGFEGEGPDVDVNLPKADIDVSGPKVDVDVPDVNIEGPDAKLKGPKFKMPEMSIKAPKISMPDIDLNLKGPKVKGDVDVTLPKVEGDLKGPEADIKGPKVDINTPDVDVHGPDWHLKMPKVKMPKFSMPGFKGEGPDVDVSLPKADIDVSGPRVDVDIPDVNIEGPDAKLKGPKFKMPEINIKAPKISIPDVDLDLKGPKVKGDFDVSVPKVEGTLKGPEVDLKGPRLDFEGPDAKLSGPSLKMPSLEISAPKVTAPDVDLHLKAPKIGFSGPKLEGGEVDLKGPKVEAPSLDVHMDSPDINIEGPDVKIPKFKKPKFGFGAKSPKADIKSPSLDVTVPEAELNLETPEISVGGKGKKSKFKMPKIHMSGPKIKAKKQGFDLNVPGGEIDASLKAPDVDVNIAGPDAALKVDVKSPKTKKTMFGKMYFPDVEFDIKSPKFKAEAPLPSPKLEGELQAPDLELSLPAIHVEGLDIKAKAPKVKMPDVDISVPKIEGDLKGPKVQANLGAPDINIEGLDAKVKTPSFGISAPQVSIPDVNVNLKGPKIKGDVPSVGLEGPDVDLQGPEAKIKFPKFSMPKIGIPGVKMEGGGAEVHAQLPSLEGDLRGPDVKLEGPDVSLKGPGVDLPSVNLSMPKVSGPDLDLNLKGPSLKGDLDASVPSMKVHAPGLNLSGVGGKMQVGGDGVKVPGIDATTKLNVGAPDVTLRGPSLQGDLAVSGDIKCPKVSVGAPDLSLEASEGSIKLPKMKLPQFGISTPGSDLHVNAKGPQVSGELKGPGVDVNLKGPRISAPNVDFNLEGPKVKGSLGATGEIKGPTVGGGLSGIGVQGLEGNLQMPGIKSSGCDVNLPGVNVKLPTGQISGPEIKGGLKGSEVGFHGAAPDISVKGPAFNMASPESDFGINLKGPKIKGGADVSGGVSAPDISLGEGHLSVKGSGGEWKGPQVSSALNLDTSKFAGGLHFSGPKVEGGVKGGQIGLQAPGLSVSGPQGHLESGSGKVTFPKMKIPKFTFSGRELVGREMGVDVHFPKAEASIQAGAGDGEWEESEVKL

SEQ ID NO: 3865 - protein, 493 aa, Homo sapiens
MRPIICICNDQFAPSLRQLKQQAFLLHFPPTLPSRLVQRLQEVSLRQGMRADPGVLAALCEKTDNDIRACINTLQFLYSRGQRELSVRDVQATRVGLKDQRRGLFSVWQEVFQLPRAQRRRVGQDPALPADTLLLGDGDAGSLTSASQRFYRVLHAAASAGEHEKVVQGLFDNFLRLRLRDSSLGAVCVALDWLAFDDLLAGAAHHSQSFQLLRYPPFLPVAFHVLFASSHTPRITFPSSQQEAQNRMSQMRNLIQTLVSGIAPATRSRATPQALLLDALCLLLDILAPKLRPVSTQLYSTREKQQLASLVGTMLAYSLTYRQERTPDGQYIYRLEPNVEELCRFPELPARKPLTYQTKQLIAREIEVEKMRRAEASARVENSPQVDGSPPGLEGLLGGIGEKGVHRPAPRNHEQRLEHIMRRAAREEQPEKDFFGRVVVRSTAVPSAGDTAPEQDSVERRMGTAVGRSEVWFRFNEGVSNAVRRSLYIRDLL

SEQ ID NO: 3866 - protein, 303 aa, Homo sapiens [sequence omitted]

SEQ ID NO: 3867 - protein, 168 aa, Homo sapiens
MPLIWKPGYLDRALQVMEKVAASPEDIKLCREALDVLGAVLKALTSADGASEEQSQNDEDNQGSEKLVEQLDIEETEQSKLPQYLERFKALHSKLQALGKIESEGLLSLTTQLVKEKLSTCEAEDIATYEQNLQQWHLDLVQLIQREQQQREQAKQEYQAQKAAKASA

SEQ ID NO: 3868 - protein, 392 aa, Homo sapiens
MKLQSTPGSGPLVSSGCQAQQLAVRLEPQGLLYAKLTLSEQQEAPATAEPRVFGLPLPLLVERERPPGQVPLIIQKCVGQIERRGLRVVGLYRLCGSAAVKKELRDAFERDSAAVCLSEDLYPDINVITGILKDYLRELPTPLITQPLYKVVLEAMARDPPNRVPPTTEGTRGLLSCLPDVERATLTLLLDHLRLVSSFHAYNRMTPQNLAVCFGPVLLPARQAPTRPRARSSGPGLASAVDFKHHIEVLHYLLQSWPDPRLPRQSPDVAPYLRPKRQPPLHLPLADPEVVTRPRGRGGPESPPSNRYAGDWSVCGRDFLPCGRDFLSGPDYDHVTGSDSEDEDEEVGEPRATGDFEDDFDAPFNPHLNLKDFDALILDLERELSKQINVCL

SEQ ID NO: 3869 - protein, 146 aa, Homo sapiens [sequence omitted]

SEQ ID NO: 3870 - protein, 137 aa, Homo sapiens [sequence omitted]

SEQ ID NO: 3871 - protein, 172 aa, Homo sapiens
MSFLCLVVLYYIVWSVLFLRSMDVIAEQRRTHITMALSWMTIVVPLLTFEILLVHKLDGHNAFSCIPIFVPLWLSLITLMATTFGQKGGNHWWFGIRKDFCQFLLEIFPFLREYGNISYDLHHEDNEETEETPVPEPPKIAPMFRKKARVVITQSPGKYVLPPPKLNIEMPD

SEQ ID NO: 3872 - protein, 175 aa, Homo sapiens
MATATNELGQATCAASLTVRPGGSTSPFSSPITSDEEYLSPPEEFPEPGETWPRTPTMKPSPSQNRRSSDTGSKAPPTFKVSLMDQSVREGQDVIMSIRVQGEPKPVVSWLRNRQPVRPDQRRFAEEAEGGLCRLRILAAERGDAGFYTCKAVNEYGARQCEARLEVRGEYLISP

SEQ ID NO: 3873 - protein, 172 aa, Homo sapiens
MLHFHYYDTSNKIMEPHRPNVKTAVPLSLESYHISEEYGFLLPDSLKELPDHYRPWMEIANKLPQLIDAHQLQAHVDKMPLLSCQFLKGHREQRLAHLVLSFLTMGYVWQEGEAQPAEVLPRNLALPFVEVSRNLGLPPILVHSDLVLTNWTKKDPDGDGVSLCLPGWSAVA

SEQ ID NO: 3874 - protein, 135 aa, Homo sapiens
MELSVLDSLNARMARPQGSSVHDGVPVPFQLPPGVSNEAQYVFTIQSIVMAQKLKGTLSFIAKNDEGATHEKLDFRLHFSCSSYLITTPCYRWGPGPLPYVPEPPPPPLYLADTCAPGTEASGQDFRDGFGGAGS

SEQ ID NO: 3875 - protein, 514 aa, Homo sapiens
MSVLGEYERHCDSINSDFGSESGGCGDSSPGPSASQGPRAGGGAFGEATLYRRTEDDSLVVWKEVDLTRLSEKERRDALNEIVILALLQHDNIIAYYNHFMDNTTLLIELEYCNGGNLYDKILRQKDKLFEEEMVVWYLFQIVSAVSCIHKAGILHRDIKTLNIFLTKANLIKLGDYGLAKKLNSEYSMAETLVGTPYYMSPELCQGVKYNFKSDIWAVGCVIFELLTLKRTFDATNPLNLCVKIVQGIRAMEVDSSQYSLELIQMVHSCLDQDPEQRPTADELLDRPLLRKRRREMEEKVTLLNAPTKRPRSSTVTEAPIAVVTSRTSEVYVWGGGKSTPQKLDVIKSGCSARQVCAGNTHFAVVTVEKELYTWVNMQGGTKLHGQLGHGDKASYRQPKHVEKLQGKAIRQVSCGDDFTVCVTDEGQLYAFGSDYYGCMGVDKVAGPEVLEPMQLNFFLSNPVEQVSCGDNHVVVLTRNKEVYSWGCGEYGRGSLVSVHFFTGIQPDFKVVCI

SEQ ID NO: 3876 - protein, 291 aa, Homo sapiens
MRAYVYSYARICMHMYIHIHAYACMCIFIYTHMHACVYSCTRICIHMYIHMHAYAYICIFICTHMHTYVYSYTRICIHMYVHIHAYAYICIFIYTHMHTYMYIHMHAYAYIYVYSYTRICIHICIFICTHMHTYMCIHMYTCIHICVFMCTMHAYVYSYVHMHAYVCVHMYTCVHMCIHKYTCMHMCIHMYTCIHRCIFIYTYVYICVYIHIYICIHVCVYSYIHMYTYVYIHVYIGIHMCVYSYMHRYTYVYIHICICVHIYTHIHIHTHNFNHLSIDEHSLFLYLGYWE

SEQ ID NO: 3877 - protein, 227 aa, Homo sapiens
MEGHRCGAGTCPVLPTSPPPSPHLRLPTELSVAQCTQRPVDIVFLLDGSERLGEQNFHKSRRFVEQVARRLTLARRDDDPLNARVALLQFGGPGEQQVAFPLSHNLTAIHEALETTQYLNSFSHVGAGVVHAINAIVRSPRGGARRHAELSFVFLTDGVTGNDSLHESAHSMRKQNVVPTVLALGSDVDMDVLTTLSLGDRAAVFHEKDYDSLAQPGFFDRFIRWIC

SEQ ID NO: 3878 - protein, 698 aa, Homo sapiens [sequence omitted]

SEQ ID NO: 3879 - protein, 211 aa, Homo sapiens [sequence omitted]

SEQ ID NO: 3880 - protein, 263 aa, Homo sapiens
MIGYTLKYVAFNGTKVGKQIVENFSPNQTKFTVQRTDPVSRYRFTLSARTQVGSGEAVTEESPAPPNEGNHTKKTVPVKAQAQPIQLTDLYPGMTYTLRVYSRDNEGISSTVITFMTSTAYTNNQADIATQGWFIGLMCAIALLVLILLIVCFIKRSRGGKYPVREKKDVPLGPEDPKEEDGSFDYSDEDNKPLQGSQTSLDGTIKQQESDDSLVDYGEGGEGQFNEDGSFIGQYTVKKDKEETEGNESSEATSPVNAIYSLA

SEQ ID NO: 3881 - protein, 615 aa, Homo sapiens
MNVRILGRHLVFPFIFIVIKELTLEGTPMNVNNLENPLDAPQNFKCMQGLSVEKPYKCKKCEKAFNNLSSFQIHERMHRGGKYHACKGSGNTYRFSGFYHRHKMPHAGGKFYGCKKCGKAFISFCAFRYHQRTHTKEKPYACKQCGKAYISYTSFQYHQLNHTGAKCYECKQCGKGFDLPNSIRYHEMTHTGEKPHECKQCGKTFRCASSLRIHGRTHTGEKPYECKQCGKVSRYWSGLQVHEVTHIGKKLYECKECGKSYYSSGSFLNHKRIHTREKSYECKECGKAFGNPISFQKHEGSHRKWKPYECKECGKVFSFSSSLRRHERTHTEKLCECKQHGKGFFHRSCPRHMKIDTGEILHKRKIRGKVFHSPSSFQTCERSHTREKRYKCKQCGKPFIYFNAFQRHQRSHTGENPYECKQCGKACISSTAFQCRELSHTGAKRYKCKQCGKGFNLPSSIRYHEMTHTGEKPYECKQCGRAFRSASHLRTHERTHIGEKPYECKQCGKVYRYWSGLRIHGLTHIGKKPYEFNDRGKSFYSSNFFLNHKRVHTRVKTYECKECGKAFDNPTSFQKHEGSHRKGKSYECKECGKVFSFSRSFRRYERAHTGEKPCE

SEQ ID NO: 3882 - protein, 233 aa, Homo sapiens [sequence omitted]

SEQ ID NO: 3883 - protein, 119 aa, Homo sapiens [sequence omitted]

SEQ ID NO: 3884 - protein, 141 aa, Homo sapiens [sequence omitted]

SEQ ID NO: 3885 - protein, 166 aa, Homo sapiens
MPKRSCPFADVAPLQLKVRVSQRELSRGVCAERYSQEVFEKTKRLLFLGAQAYLDHVWDEGCAVVHLPESPKPGPTGAPRAARGQMLIGPDGRLIRSLGQASEAGEWHQQPFVAVALRAGGGTSIFLDLQGQAFPPWVSRTLTQSLAFWLRRLLLSGGLTFKTGSC

SEQ ID NO: 3886 - protein, 159 aa, Homo sapiens [sequence omitted]

SEQ ID NO: 3887 - protein, 586 aa, Homo sapiens
MDSPPLKALNSNSIYFLLLFHCMLISEVQIEHDPELEKESPGLKNSPIDESEVQTATDSPSVKPNELEEESTPSIQTETLVQQEEPCEEEAEKATCDSDFAVETLELETQGEEVKEEIPLVASASVSIEQFTENAEECALNQQMFNSDLEKKGAEIINPKTALLPSDSVFAEERNLKGILEESPSEAEDFISGITQTMVEAVAEVEKNETVSEILPSTCIVTLVPGIPTGDEKTVDKKNISEKKGNMDEKEEKEFNTKETRMDLQIGTEKAEKNEGRMDAEKVEKMAAMKEKPAENTLFKAYPNKGVGQANKPDETSKTSILAVSDVSSSKPSIKAVIVSSPKAKATVSKTENQKSFPKSVPRDQINAEKKLSAKEFGLLKPTSARSGLAESSSKFKPTQSSLTRGGSGRISALQGKLSKLDYRDITKQSQETEARPSIMKRDDSNNKTLAEQNTKNPKSTTGRSSKSKEEPLFPFNLDEFVTVDEVIEEVNPSQAKQNPLKGKRKETLKNVPFSELNLKKKKGKTSTPRGVEGELSFVTLDEIGEEEDAAAHLAQALVTVDEVIDEEELNMEEMVKKFKFTFYIR

SEQ ID NO: 3888 - protein, 160 aa, Homo sapiens
METFSCKGYGGTPAIGISPCLLQHGNRLRDLPGLSRATSECKGKECSSRKGMCLSSHHLRARPVPGSAGFLHQHGLFISNHWEGMCAESCQDGKAHVPILTAAERKMAAEGKQQQKEKFDSDGLRGQWQAILVHVSCISDRVLLCCPGWSAVAQSWLTEG

SEQ ID NO: 3889 - protein, 119 aa, Homo sapiens
MTEDFLPVLREYILYSDSMKSVLKKRDQVQAEYEAKLEAVALRKEDRPKVPADVEKCQDRMECFNADLKADMERWQNNKRQDFRQLLMGMADKNIQYYEKCLMAWESIIPLLQEKQEAK

SEQ ID NO: 3890 - protein, 206 aa, Homo sapiens
MHPSIHSSIDLFIHLFILPSIHLYIHLSFHLPIYYFIHPSIPLSLHPTILISTHLFAHTSIHPTIHPSAHSSNHAHILAFIHLSLLSSIHTSIHPPIHPSTHPSIHLCIHSSIHPYIHLSIQPSSQPSIHPSIHPYIHPSIHPPIYPSIHPSIHLPIYPSIHPPIYPCIHPSIIYPFTHSPIHPSIIYPFTHPSIHSPIHPICLYQ

SEQ ID NO: 3891 - protein, 403 aa, Homo sapiens [sequence omitted]

SEQ ID NO: 3892 - protein, 155 aa, Homo sapiens
MGQGGGHTSQSLTSCGSRPLAAAVGARIRLWEAPAWLTPPVPVCLCASTQPALPKARAVAPKPSSRGEYVVAKLDDLVNWARRSSLWPMTFGLACCAVEMMHMAAPRYDMDRFGVVFRASPRQSDVMIVAGTLTNKMAPALRKVGLVPAAQPPPE

SEQ ID NO: 3893 - protein, 121 aa, Homo sapiens [sequence omitted]

SEQ ID NO: 3894 - protein, 105 aa, Homo sapiens [sequence omitted]

SEQ ID NO: 3895 - protein, 491 aa, Homo sapiens
MAIPKHSLSPVPWEEDSFLQVKVEEEEEASLSQGGESSHDHIAHSEAARLRFRHFRYEEASGPHEALAHLRALCCQWLQPEAHSKEQILELLVLEQFLGALPPEIQAWVGAQSPKSGEEAAVLVEDLTQVLDKRGWDPGAEPTEASCKQSDLGESEPSNVTETLMGGVSLGPAFVKACEPEGSSERSGLSGEIWTKSVTQQIHFKKTSGPYKDVPTDQRGRESGASRNSSSAWPNLTSQEKPPSEDKFDLVDAYGTEPPYTYSGKRSSKCRECRKMFQSASALEAHQKTHSRKTPYACSECGKAFSRSTHLAQHQVVHTGAKPHECKECGKAFSRVTHLTQHQRIHTGEKPYKCGECGKTFSRSTHLTQHQRVHTGERPYECDACGKAFSQSTHLTQHQRIHTGEKPYKCDACGRAFSDCSALIRHLRIHSGEKPYQCKVCPKAFAQSSSLIEHQRIHTGEKPYKCSDCGKAFSRSSALMVHLRIHITVLQ

SEQ ID NO: 3896 - protein, 213 aa, Homo sapiens
MGCMVGADVLVGRHQGAGENKLVGDLLVLGGATLYGISNVWEEYIIRTLSRVEFLGMIGLFGAFFSGIQLAIMEHKELLKVPWDWQIGLLYVGFSACMFGLYSFMPVVIKKTSATSVNLSLLTADLYSLFCGLFLFHYKFSGLYLLSFFTILIGLVLYSSTSTYIAQDPRVYKQFRNPSGPVVDLPTTAQVEPSVTYTSLGQETEEEPHVRVA

SEQ ID NO: 3897 - protein, 410 aa, Homo sapiens [sequence omitted]

SEQ ID NO: 3898 - protein, 584 aa, Homo sapiens [sequence omitted]

SEQ ID NO: 3899 - protein, 1001 aa, Homo sapiens
MNSYSDSGYQEAGSFHNSQNVSKADNRQQHSFIGSTNNHVVRNSRAEGQTLVQPSVANRAMRRVSSVPSRAQSPSYVISTGVSPSRGSLRTSLGSGFGSPSVTDPRPLNPSAYSSTTLPAARAASPYSQRPASPTAIRRIGSVTSRQTSNPNGPTPQYQTTARVGSPLTLTDAQTRVASPSQGQVGSSSPKRSGMTAVPQHLGPSLQRTVHDMEQFGQQQYDIYERMVPPRPDSLTGLRSSYASQHSQLGQDLRSAVSPDLHITPIYEGRTYYSPVYRSPNHGTVELQGSQTALYRTGSVGIGNLQRTSSQRSTLTYQRNNYALNTTATYAEPYRPIQYRVQECNYNRLQHAVPADDGTTRSPSIDSIQKDPREFAWRDPELPEVIHMLQHQFPSVQANAAAYLQHLCFGDNKVKMEVCRLGGIKHLVDLLDHRVLEVQKNACGALRNLVFGKSTDENKIAMKNVGGIPALLRLLRKSIDAEVRELVTGVLWNLSSCDAVKMTIIRDALSTLTNTVIVPHSGWNNSSFDDDHKIKFQTSLVLRNTTGCLRNLSSAGEEARKQMRSCEGLVDSLLYVIHTCVNTSDYDSKTVENCVCTLRNLSYRLELEVPQARLLGLNELDDLLGKESPSKDSEPSCWGKKKKKKKRTPQEDQWDGVGPIPGLSKSPKGVEMLWHPSVVKPYLTLLAESSNPATLEGSAGSLQNLSAGNWKFAAYIRAAVRKEKGLPILVELLRMDNDRVVSSVATALRNMALDVRNKELIGKYAMRDLVNRLPGGNGPSVLSDETMAAICCALHEVTSKNMENAKALADSGGIEKLVNITKGRGDGSSLKVVKAAAQVLNTLWQYRDLRSIYKKDGWNQNHFITPVSTLERDRFKSHPSLSTTNQQMSPIIQSGSSKPSPIYISSYSSPAREQNRRLQHQQLYYSQDDSNRKNFDAYRLYLQSPHSYEDPYFDDRVHFPASTDYSTQYGLKSTTNYVDFYSTKRPSYRAEQYPGSPDSWV

SEQ ID NO: 3900 - protein, 250 aa, Homo sapiens
MCHNVFIVESVCVGWFSLEFLLRLIQAPSKFAFLRSPLTLIDLVAILPYYITLLVDGAAAGRRKPGAGNSYLDKVGLVLRVLQALRILYVMRLARHSLGLQTLGLTARRCTREFGLLLLFLCVAIALFAPLLYVIENEMADSPEFTSIPACYWWAVITMTTVGYGDMVPRSTPGQVVALSSILSGILLMAFPVTSIFHTFSRSYLELKQEQERVMFRRAQFLIKTKSQLSVSQDSDILFGSASSDTRDNN

SEQ ID NO: 3901 - protein, 143 aa, Homo sapiens
MPGALQMLSNSPRRDSLLARGLVSACVLMPSSLLSTAPQVLSTSSPAQQAENEAKASSSILINESEPTTNIQIRLADGGRLVQKFNHSHRISDIRLFIVDARPAMAATSFILMTTFPNKELADESQTLKEANLLNAVIVQRLT

SEQ ID NO: 3902 - protein, 181 aa, Homo sapiens [sequence omitted]

SEQ ID NO: 3903 - protein, 160 aa, Homo sapiens
MCGMLPFSAFQCNGPCIGPHLAVQHRQVFCQTRDGITLPSEQCSALPRPVSTQNCWSEACSVHWRVSLWTLCTATCGNYGFQSRRVECVHARTNKAVPEHLCSWGPRPANWQRCNITPCENSMFQPQRTFCKFPIEHRVQRAVPGTDPEHRAWGQLPQGL

SEQ ID NO: 3904 - protein, 373 aa, Homo sapiens
MFFYVTQGQEEIASSGTSYLNRTEAANVEKITTKLLKAGAKPDQIGIITPYEGQRSYLVQYMQFSGSLHTKLYQEVEIASVDAFQGREKDFIILSCVRANEHQGIGFLNDPRRLNVALTRARYGVIIVGNPKALSKQPLWNHLLNYYKEQKVLVEGPLNNLRESLMQFSKPRKLVNTINPGARFMTTAMYDAREAIIPGSVYDRSSQGRPSSMYFQTHDQIGMISAGPSHVAAMNIPIPFNLVMPPMPPPGYFGQANGPAAGRGTPKGKTGRGGRQKNRFGLPGPSQTNLPNSQASQDVASQPFSQGALTQGYISMSQPSQMSQPGLSQPELSQDSYLGDEFKSQIDVALSQDSTYQGERAYQHGGVTGLSQY

SEQ ID NO: 3905 - protein, 441 aa, Homo sapiens [sequence omitted]

SEQ ID NO: 3906 - protein, 134 aa, Homo sapiens
MPPRRSIVEVKVLDVQKRRVPNKHYVYIIRVTWSSGSTEAIYRRYSKFFDLQMQMLDKFPMEGGQKDPKQRIIPFLPGKILFRRSHIRDVAVKRLIPIDEYCKALIQLPPYISQCDEVLQFFETRPEDLNPPKE

SEQ ID NO: 3907 - protein, 413 aa, Homo sapiens
MGHNMGINHDNDHPSCADGLHIMSGEWIKGQNLGDVSWSRCSKEDLERFLRSKASNCLLQTNPQSVNSVMVPSKLPGMTYTADEQCQILFGPLASFCQEMQHVICTGLWCKVEGEKECRTKLDPPMDGTDCDLGKWCKAGECTSRTSAPEHLAGEWSLWSPCSRTCSAGISSRERKCPGLDSEARDCNGPRKQYRICENPPCPAGLPGFRDWQCQAYSVRTSSPKHILQWQAVLDEEKPCALFCSPVGKEQPILLSEKVMDGTSCGYQGLDICANGRCQKVGCDGLLGSLAREDHCGVCNGNGKSCKIIKGDFNHTRGAGYVEVLVIPAGARRIKVVEEKPAHSYLALRDAGKQSINSDWKIEHSGAFNLAGTTVHYVRRGLWEKISAKGPTTAPLHLLVLLFQDQNYGLHYE

SEQ ID NO: 3908 - protein, 1058 aa, Homo sapiens
MERSPGEGPSPSPMDQPSAPSDPTDQPPAAHAKPDPGSGGQPAGPGAAGEALAVLTSFGRRLLVLIPVYLAGAVGLSVGFVLFGLALYLGWRRVRDEKERSLRAARQLLDDEKLLAETVAPAVRGSNPHLQTFTFTRVELGEKPLRIIGVKVHPGQRKEQILLDLNISYVGDVQIDVEVKKYFCKAGVKGMQLHGVLRVILEPLIGDLPFVGAVSMFFIRRPTLDINWTGMTNLLDIPGLSSLSDTMIMDSIAAFLVLPNRLLVPLVPDLQDVAQLRSPLPRGIIRIHLLAARGLSSKDKYVKGLIEGKSDPYALVRLGTQTFCSRVIDEELNPQWGETYEVMVHEVPGQEIEVEVFDKDPDKDDFLGRMKLDVGKVLQASVLDDWFPLQGGQGQVHLRLEWLSLLSDAEKLEQVLQWNWGVSSRPDPPSAAILVVYLDRAQDLPLKKGNKEPNPMVQLSIQDVTQESKAVYSTNCPVWEEAFRFFLQDPQSQELDVQVKDDSRALTLGALTLPLARLLTAPELILDQWFQLSSSGPNSRLYMKLVMRILYLDSSEICFPTVPGCPGAWDVDSENPQRGSSVDAPPRPCHTTPDSQFGTEHVLRIHVLEAQDLIAKDRFLGGLVKGKSDPYVKLKLAGRSFRSHVVREDLNPRWNEVFEVIVTSVPGQELEVEVFDKDLDKDDFLGRCKVRLTTVLNSGFLDEWLTLEDVPSGRLHLRLERLTPRPTAAELEEVLQVNSLIQTQKSAELAAALLSIYMERAEDLPLRKGTKHLSPYATLTVGDSSHKTKTISQTSAPVWDESASFLIRKPHTESLELQVRGEGTGVLGSLSLPLSELLVADQLCLDRWFTLSSGQGQVLLRAQLGILVSQHSGVEAHSHSYSHSSSSLSEEPELSGGPPHITSSAPELRQRLTHVDSPLEAPAGPLGQVKLTLWYYSEERKLVSIVHGCRSLRQNGRDPPDPYVSLLLLPDKNRGTKRRTSQKKRTLSPEFNERFEWELPLDEAQRRKLDVSVKSNSSFMSRERELLGKVQLDLAETDLSQGVARWYDLMDNKDKGSS

SEQ ID NO: 3909 - protein, 482 aa, Homo sapiens
MKFKLHVNSARQYKDLWNMSDDKPFLCTAPGCGQRFTNEDHLADQTPTPTRFLKNCEEVGLFNELASPFENEFKKASEDDIKKMPLDLSPLATPIIRSKIEEPSVVETTHQDSPLPHPESTTSDEKEVPLAQTAQPTSAIVRPASLQVPNVLLTSSDSSVIIQQAVPSPTSSTVITQAPSSNRPIVPVPGPFPLLLHLPNGQTMPVAIPASITSSNVHVPAAVPLVRPVTMVPSVPGIPGPSSPQPVQSEAKMRLKAALTQQHPPVTNGDTVKGHGSGLVRTQSEESRPQSLQQPATSTTETPASPAHTTPQTQSTSGRRRRAANEDPDEKRRKFLERNRAAASRCRQKRKVWVQSLEKKAEDLSSLNGQLQSEVTLLRNEVAQLKQLLLAHKDCPVTAMQKKSGYHTADKDDSSEDISVPSSPHTEAIQHSSVSTSNGVSSTSKAEAVATSVLTQMADQSTEPALSQIVMAPSSQSQPSGS

SEQ ID NO: 3910 - protein, 100 aa, Homo sapiens [sequence omitted]

SEQ ID NO: 3911 - protein, 284 aa, Homo sapiens
METMRAQRLQPGVGTSGRGTLRALRPGVTGAAAATAKHTQGYGRVNVVEALQEFWQMKQSRGADLKNGALVVYEMVPSNSPPYVCYVTLPGGSCFGSFQFCPTKAEARRSAAKIALMNSVFNEHPSRRITDEFIEKSVSEALASFNGNREEADNPNTGIGAFRFMLESNKGKSMLEFQELMTVFQLLHWNGSLKAMRERQCSRQEVLAHYSHRALDDDIRHQMALDWVSREQSVPGALSRELASTERELDEARLAGKELRFHKEKKDILVLAAGQLGNMHSSNC

SEQ ID NO: 3912 - protein, 108 aa, Homo sapiens [sequence omitted]

SEQ ID NO: 3913 - DNA, 3355 bp, Homo sapiens
gacgcgctgaccgagcgcagcggccgggccggcgggcgggcgggcggctgcgagcatggtcctggtgctgcaccacatcctcatcgctgttgtccaattcctcaggcggggccagcaggtcttcctcaagccggacgagccgccgccgccgccgcagccatgcgccgacagcctgcaggacgccttgctgagtctgggctctgtcatcgacatttcaggcctgcaacgtgctgtcaaggaggccctgtcagctgtgctcccccgagtggaaactgtctacacctacctactggatggtgagtcccagctcgtgtgtgaggaccccccacatgagctgccccaggaggggaaagtccggttcaccgacgaggacgagcatgtgatccagcactgcttccactacaccagcaccgtgctcaccagcaccctggccttccagaaggaacagaaactcaagtgtgagtgccaggctcttctccaagtggcaaagaacctcttcacccacctggatgacgtctctgtcctgctccaggagatcatcacggaggccagaaacctcagcaacgcagagatctgctctgtgttcctgctggatcagaatgagctggtggccaaggtgttcgacgggggcgtggtggatgatgagagctatgagatccgcatcccggccgatcagggcatcgcgggacacgtggcgaccacgggccagatcctgaacatccctgacgcatatgcccatccgcttttctaccgcggcgtggacgacagcaccggcttccgcacgcgcaacatcctctgcttccccatcaagaacgagaaccaggaggtcatcggtgtggccgagctggtgaacaagatcaatgggccatggttcagcaagttcgacgaggacctggcgacggccttctccatctactgcggcatcagcatcgcccattctctcctatacaaaaaagtgaatgaggctcagtatcgcagccacctggccaatgagatgatgatgtaccacatgaaggtctccgacgatgagtataccaaacttctccatgatgggatccagcctgtggctgccattgactccaattttgcaagtttcacctatacccctcgttccctgcccgaggatgacacgtccatggccatcctgagcatgctgcaggacatgaatttcatcaacaactacaaaattgactgcccgaccctggcccggttctgtttgatggtgaagaagggctaccgggatcccccctaccacaactggatgcacgccttttctgtctcccacttctgctacctgctctacaagaacctggagctcaccaactacctcgaggacatcgagatctttgccttgtttatttcctgcatgtgtcatgacctggaccacagaggcacaaacaactctttccaggtggcctcgaaatctgtgctggctgcgctctacagctctgagggctccgtcatggagaggcaccactttgctcaggccatcgccatcctcaacacccacggctgcaacatctttgatcatttctcccggaaggactatcagcgcatgctggatctgatgcgggacatcatcttggccacagacctggcccaccatctccgcatcttcaaggacctccagaagatggctgaggtgggctacgaccgaaacaacaagcagcaccacagacttctcctctgcctcctcatgacctcctgtgacctctctgaccagaccaagggctggaagactacgagaaagatcgcggagctgatctacaaagaattcttctcccagggagacctggagaaggccatgggcaacaggccgatggagatgatggaccgggagaaggcctatatccctgagctgcaaatcagcttcatggagcacattgcgatgcccatctacaagctgttgcaggacctgttccccaaagcggcagagctgtacgagcgcgtggcctccaaccgtgagcactggaccaaggtgtcccacaagttcaccatccgcggcctcccaagtaacaactcgctggacttcctggatgaggagtacgaggtgcctgatctggatggcactagggcccccatcaatggctgctgcagccttgatgctgagtgatcccctccagggacacttccctgcccaggccacctcccacagccctccactggtctggccagatgcactgggaacagagccacgggtcctgggtcctagaccaggacttcctgtgtgaccctggacaagtactaccttcctgggcctcagctttctcgtctgtataatggaagcaagacttccaacctcacggagactttgtaatttgttctctgagagcacaggggtgaccaatgagcagtgggccctactctgcacctctgaccacaccttggcaagtctttcccaagccattctttgtctgagcagcttgatggtttctccttgccccatttctgccccaccagatctttgctcctttccctttgaggactcccaccctttggggtctccaggatcctcatggaaggggaaggtgagacatctgagtgagcagagtgtggcatcttggaaacagtccttagttctgtgggaggactagaaacagccgcggggcgaaggccccctgaggaccactactatactgatggtgggattgggacctgggggatacaggggccccaggaagaagctgccagaggggcagctcagtgctctgcagagaggggccctggggagaagcaggatgggattgatgggcaggagggatccccgcactgggagacaggcccaggtatgaatgagccagccatgcttcctcctgcctgtgtgacgctgggcgagtctcttcccctgtctgggccaaacagggagcgggtaagacaatccatgctctaagatccattttagatcaatgtctaaaatagctctatcgctctgcggagtcccagcagaggctatggaatgtttctgcaaccctaaggcacagagagcccaaccctgagtgtctcagaggccccctgagtgttctccttggcctgagccccttacccattcctgcagccagtgagagacctggcctcagccctggcagggttctctcttcaaggccatatccacctgtgccctggggcttgggagaccccatagggccgggactcttgggtcagcccggccactggcttctctctttttctccgtttcattctgtgtgcgttgtggggtgggggagggggtccacctgccttacctttctgagttgcctttagagagatgcgtttttctaggactctgtgcaactgtcgtatatggtcccgtgggctgaccgctttgtacatgagaataaatctatttctttctacc

SEQ ID NO: 3914 - DNA, 4006 bp, Homo sapiens
actcagacacgcagctggaccggacagggcggcttccgggtttggcgcggcctttgtctcttgctgcagccggagctccggtctcgtcttcactgctgtttgtcctctgctcctagaggcccagactctgtggctctgtgacctgcaggtattgggagatccacagctaagactccaggaccctctggaagcctagaaatgggaccattgacatttatggatgtggccatagaattctctctggaggagtggcagtgcctggacacagcacagcagaatttatataggaatgtcatgttagagaattatagaaacctggtattcctgggtattgctgtgtctaatttagacctgatcacctgtctggagcaaggaaaagagccctggaatatgaagagacacgagatggtagccaaacccccagctatgtgttctcattttgccaaagaccttaggccagagcaatatataaaaaattctttccaacaagtgatactgagaagatatggaaaatgtggatatcagaaaggctgtaaaagtgtggatgagcataagttgcacaaaggaggtcacaagggacttaaccagtgtgtgacaactacccagagcaaaatagttcagtgtgacaaatacgtgaaagtctttcataaatattcaaatgcaaagagacataagataagacatactggaaaaaatcctttcaaatgtaaagaatgtggcaaatcattttgcatgctttcacaactaactcaacatgagataattcatactggagaaaaaccctacaaatgtgaagaatgtggcaaagcttttaaaaagtcctcaaaccttacgaatcataagataattcatactggagagaaaccctacaaatgtgaagaatgtggaaaagcttttaaccagtcctcaactcttactagacataagataattcatactggagagaaactctacaaatgtgaagaatgtggcaaagcttttaaccggtcctcaaaccttactaaacataagatagttcatactggagagaaaccctacaaatgtgaagaatgtggcaaagcttttaaacagtcctcaaaccttactaatcacaagaaaattcatactggagagaaaccctacaaatgtggagaatgtggcaaagcctttaccctatcttcacaccttactacacataagaggattcatactggtgagaaaccctacaaatgtgaagaatgtggcaaagcttttagtgtattttcaacccttactaaacataagataattcatactgaagagaaaccctacaaatgtgaagaatgtggcaaagcttttaaccggtcctcacaccttactaatcataaggtaattcatactggagagaaaccctacaaatgtgaagaatgtggtaaagcctttaccaagtcctcaactcttacttatcataaggtaattcatactggaaagaaaccctacaaatgtgaagaatgtggtaaagcctttagtatattctcaatccttactaaacataaagtaattcatactgaagacaaaccctacaaatgtgaagaatgtggcaaaacttttaactactcctcaaattttactaatcataaaaaaattcatactggagagaaaccctataagtgtgaagaatgtggcaaaagctttattctgtcctctcatcttactacacataagataattcatactggagagaaaccctacaaatgtaaagaatgtggcaaagcttttaaccagtcctcaacccttatgaaacataagataattcatactggagagaaaccctacaaatgtgaagaatgtggcaaagcctttaaccagtccccaaaccttactaaacataagagaattcataccaaagagaaaccctacaaatgtaaataatgtgtcaaatcctttagtgtattttcaacttttattaaaacacaagataattcatactggagagaaatcctacaaatgtgataaatgtggcaaagcctttaactggctcttaatccttatgaaacaaaagataattcatactagagagaaaccctacaaatgtaaagaatgtggcaaagcatttaactggtccctaaatcttactaaacataaaaaaacttaaactggagagaaactacaaagctggaagacatcacagtaattctgacaacacctcaaacttttctaaacataaaataaatcatactggtgaggaactttaaaaatgcgaaaaatgtgacaaaatctttaaatgattgtcacacttgattgtaggtaagataattcttactagaaaaactcttacaagtgtgaagaatgtggcaaaatttttaatgaatactcacaccttattgccaggaaagcatttatacttgagaaaaattgtaccaatataaagactgtgaaaaagccattaatgtctgctcacatcttactcaacatcagagagtacttaaaaaaagtattataaatttaattactgtcaaaaagtatttcagaaaatataagcttttaaagtatttattttgaagacaaacattacaaataaaagagggttgtaatacctttatttgtatcacagatcttattgtacacattttgtactagagaaaaccctgaagcagttacttaaactttgttcaacatcagggaattcagattggagaaaaaccctgcaaatgtaataaatttgaaaaaaaagttttccaaaactacaacttagacaacaccagagggttcatactgagatatatttttgcagatgcagtatatatttaaaacatttaatccaaaataagtctatgtaaatatcagagaattcacagtggaaatatctaaggtagggccgggcatggtggctcacgcctgtagtgccagcactttgggaggctgaggtgggcagatcatgaggtcaacagattgagaccatcctggtcaacatggtaaaaccctgtctctactaaaaatacaaaaattagctgggcgtggcggcacgtgcctgtggtctcagctacttgggacgctgaggcaggaaaatccgttgaacccaggaggcagaggttgtagtgagccgggattgcaccactgcactccagccgggtgacagagtgagactccatctcaaaaacaaacaaactaaggtatggatgcttcagacattacactatatcaaagtgctgactgttaaaaatgatcccaaactaacggtagataaatttatttgtacataactttaaaaggagtagaagattttttggaagtttgtaattacattcaaagtatactttttttgtttgtttgttttccttgagacagagtctctctctgtcgtccaggctggagtgcagtggcacagtctcggctcgctgcagcctctgcctcctgggttcaagcaattctcctgcctcagcctactgagtggctgagattacaggtgcacaccaccacgtccggctgacttttgtatttttagtggggacggggtttcaccatgttggtcagggtagtcttgaactcctgacctcatgctctgcccagcttggcttcccaaggtgctgtgattacaggcttaagccacagcgcccgacccaaagtgttcttttttccttgaaaagaagtacagattttttaaaaagctaatattgctgtgattcaactctcaagttacttgatgctatttcttcatttctattgtattcacatgtgaaagcatgtgatcagttgtcacggcatcaaagataggagagtttctttttttttaggtgggcattatttatgaccttttctttggaagagtaaggatattaaaatgtaacatgcatgatgaaaatctaagtggagatgatatttgtggttaattatgatattgagtggtgcatgaggtaggtgtttagagtaatattcttttgcattatagtaagaacatttaagttttgttaaaattaaaaaattagtagtacgttattttactatttgtacttttatgtaataaaatgcagtacatttttaaattttc

SEQ ID NO: 3915 - DNA, 5392 bp, Homo sapiens
gagtgttttcagaagtgggaatagcaggcgaggtcttgaggcctgaagaagcaaagcgtcgcttagtcaatgctgagatgcgtcttgtggaacagaatttttgggacatttgcaggatgagttagatgaactccgtgctgagatggaagagatgagagacagttatttagaggaagatgtttaccagctgcaggaacttcggcgagaactggaccgcgctaataaaaactgccgaatcctgcagtaccgtcttcggaaagccgagcagaaaagcctgaaagtggctgagacgggtcaggtggatggtgagcttattcgaagcctggagcaggacttgaaggtagccaaagatgtatctgtcagattgcaccacgaacttaagacggtggaggaaaagcgcgctaaagctgaggatgaaaacgaaactctccgacagcagatgattgaagtggaaatatccaaacaggccctccagaatgagctggagagactgaaagagagttccctaaaaagaagaagcactcgggaaatgtacaaggagaagaaaacctttaaccaggatgacagtgccgatttgaggtgccagctccagtttgccaaagaggaagccttcctgatgcgcaaaaagatggccaagctaggaagggagaaggacgagctggagcaggagctccagaagtacaagtccctctatggggatgtggacagtcccctgcccacgggggaagcaggcgggccccccagcacccgggaggccgagctgaagctgcggctaaagctggtggaggaggaagccaacatcttgggccggaagatcgtggagctggaggtggagaaccgtggcctcaaggcagagatggaggacacgcggggccagcaggagcgggagggcccgggtcgggaccacgcacccagcattcctacctcacccttcggtgactccctggagtcctccactgagctccgccgccacctgcagtttgtagaagaggaagcggagttgctccggaggtccatctccgagatcgaagaccacaaccggcaactgacccacgagctcagcaagtttaagtttgagcctccccgggagccgggctggctaggagagggtgcaagtcctggtgccgggggtggggcccccctgcaggaggagctgaagtcagccaggctgcagatcagcgagctcagcggcaaggtgctcaaactgcagcacgagaaccacgcgctgctgtccaacatccagcgctgcgacctggcagcccacctggggctgcgtgcccccagtccccgggacagcgatgccgagagtgatgcgggcaagaaggagagtgatggggaggagagccgcctgccccagcccaagcgggaagggcctgttggcggggagagtgactcggaggagatgtttgagaagacgtcgggcttcgggagcgggaagccatcggaggccagcgagccatgccccacggagctcctgaaggcccgggaggactctgagtacctagtgaccctaaaacacgaggcccagcggctagagcggacggtggagcgcctcatcacggacaccgacagcttcctccatgatgcggggctgcggggtggtgcgcccttaccggggcctggcctccagggcgaagaggagcagggtgagggggaccagcaggagccccagctgctggggaccatcaacgccaagatgaaggctttcaagaaagagctgcaggccttcctggagcaggtgaaccgcattgggggtggcctatcccccttgccccacctcacagagtcctctagcttcctctccactgtgacttccgtgtcccgggactcccccatcgggaacctggggaaggagctgggcccagacttgcagtccagactgaaagagcagctggagtggcagctcgggccggcccgaggggacgagcgggagagcctgcgcctccgagccgcgcgggagctgcaccgccgcgcagacggggacaccgggagccacgggctgggaggccagacctgcttcagcctggagctcaggggcccccccgttttacctgagcagagtgtatccatagaggagctacagggtcagctcgtgcaggcggccagactgcatcaagaggagacagagacatttacaaacaagatccataagatggaggaggagcacctctatgccttgaggtggaaagaactggaaatgcacagcctggctttgcaaaacaccctccatgagcgaacctggagtgatgagaagaatctgatgcagcaggagctccggtccttgaagcagaacattttcctcttctacgtcaaactcaggtggctgctgaaacactggcggcaagggaagcagatggaggaggaaggagaggagttcactgagggtgaacatccagagaccctctccaggctcggggagcttggagtccaggggggtcaccaggcggatggcccagaccacgacagtgaccgaggctgtggctttccagtgggggagcactccccacactcccgggtgcagattggagatcacagcttgcggctgcagaccgcggacaggggacagccccacaaacaggtggtggaaaaccagcagctgttcagcgccttcaaggccttgctggaggacttccgtgcggagctgcgggaggatgagcgtgcccgactacggctgcagcagcaatatgccagcgacaaggcggcctgggacgtggagtgggccgtgctcaagtgccgtctggaacagctggaagagaagactgagaacaagttgggagaactaggctcctccgctgagagcaagggggccttgaagaaggagagagaggtgcaccagaagctcctggcagacagtcacagcctggtcatggacctgcgctggcagatccatcacagcgagaagaactggaaccgggagaaggtggaacttctcgaccgcctggacagagatcggcaggagtgggagcggcagaagaaggaattcttgtggaggatagagcagttgcagaaagagaacagtccccggagaggtggcagtttcctctgtgatcaaaaagacggcaacgttcgcccctttccccaccagggaagcctccgcatgccccgtccagtggccatgtggccttgtgcagatgctgactccatcccgtttgaagaccggccgctgtccaagctgaaggagtcggacaggtgctcggccagtgagaatctctacctggatgccttgtccctggatgacgagccagaagagccaccagcccacaggcccgagagggagttcaggaaccgcctccctgaggaagaagaaaatcacaaaggaaatcttcaaagggcggtgtccgtgtcctccatgtctgagttccagcgtctaatggacatctcccccttcctgcctgagaagggcctgccgtccaccagcagcaaggaggatgtcaccccacccctgtctccagacgacctcaagtacatcgaggagttcaacaagagctgggactacacacccaacaggggccacaatggtggggggccggacctttgggccgacaggaccgaggtggggcgggcagggcacgaggacagcacagagcctttccccgactcctcctggtacctaaccacaagtgtcaccatgaccacggacaccatgaccagcccagagcactgccagaagcagccactgcggagccacgtcctcaccgagcagtcggggttgcgcgtgttacacagcccgcctgccgtgcgcagggtcgacagcatcacggcggcaggtggtgagggtccctttcccacaagcagagccagagggagcccgggagacaccaaggggggccctccagaacccatgctcagcaggtggccttgcacctcccccaggcactcccgggactatgtggagggggcacggcgcccccttgatagtcccctctgtacctccctggggtttgcctccccactgcacagcctggagatgtccaagaacttgagtgatgacatgaaggaggtggccttctctgtcaggaatgccatctgctctggccctggcgagctgcaagtcaaggacatggcctgccagaccaatgggtcccggacgatggggacccagactgttcagaccatcagtgtgggcttgcagactgaagccctgcgtggcagcggtgtcaccagcagcccccacaagtgtctcactccaaaggctgggggcggtgctacacccgtgtcgtctccttcccggagccttaggagcagacaggtggcccctgccatcgagaaggtgcaggccaagtttgaacgcacatgctgctcccccaagtatggttctcccaagctgcagaggaagcccctccccaaagccgaccagccaaataacaggacgtcaccagggatggcccagaaagggtacagtgagtcagcctgggcccgctccaccaccacaagggagagccccgtgcacaccaccattaatgatggcctctccagcctcttcaacatcattgaccacagccccgtggtgcaggaccccttccagaaggggctgcgggccggcagtcggtctcgctcagcagagccccgaccagagctgggcccaggccaggaaacaggcaccaattcccgaggaaggtcgcctagccccattggggtggggtcagagatgtgcagggaggaagggggagagggcacgccagtgaagcaggacttatctgctccccctggctacacgctcactgagaacgtggcccggatcctcaacaagaagctgctggaacatgccttaaaggaggagaggaggcaggctgcccacgggcccccgggtctccacagtgacagccactcgctgggggacacagccgagccagggcccatggagaaccaaactgtcttgctaactgccccctggggactctagccctgcccgcctcacgctgaactaccttgttctgcactagctccatccctagagccctgcttctccaggcccgagagaccagcaaaccgtcgccctccgtcccgttgggccccacattcccccactgcctcacagcctcagtcacccggagacccgacgtccttggaggagcatggtggcgaggagccgcccgaggagcagccacaccgagatgcaagcttgcatggattatcacagtataattcactgtaatttgcataaccacaccatcaccatgaacaaaactctgcccaacaggagagatctagttttctcaaggtcaaagaatgttttttaaaaacacaaagctgctgaatgttcaacctgtgaaactgagatgtttctagaatgaaacagtaaatgtgcctgtaataacttaatttttttcatagctcagaaaactatttttgtctccatcctttttacacacagtatattaaacgaaaaggc

SEQ ID NO: 3916 - DNA, 5154 bp, Homo sapiens
acatttgtcctgagtcacctgtccagagcaggtggtgaatattgtgtcctactcacggcatctcaactatcggagcctgggatctgactcaaaggccggcctccgtctgagaactgagcgtccatttctcaatccttgccggctctgacccaggcctgggccacaggctgtccgggaataagtggtgctgcaatccctgctgggcagatggagagaggagcaagggagatggcagccccgggggactgtgcatagggagggactcatgaagtggcagctaagccctgtccagtggccacccgtcagccaagggccagagaccaggaaaggaagaaaggcagcttcacttcctctttgaggatggagtcgcacagccgcgctggaaagagcagaaaatctgcaaaatttcggtccatctccaggtccctgatgctctgtaatgctaagaccagtgatgatggctctagccctgatgagaaatatcctgatccctttgagatttccttggcccagggcaaggagggaattttccactcatctgtgcagctggcagacacatcggaggctgggcccagcagtgttcctgatctagcactggcctcggaggctgctcaactccaagcagctgggaatgatcgaggcaagacctgtaggaggatattcttcatgaaggaatcttccacagcttcctctcgagaaaagcctggaaaactagaagcacaaagtagtaacttcctgtttcctaaagcctgccaccaaagggcacgcagcaactcaaccagtgttaatccctattgcacaagagaaattgattttccaatgaccaagaaatctgcagcgcccacggacaggcagccttactctctctgcagtaacaggaagtccctctctcaacaattggactgtccagcaggaaaggctgcgggaacttcgagaccaacacggtccctgagcacagctcagctcgtgcagccatctgggggcctccaggcttcagtcatctccaacatcgtgctgatgaagggccaggctaagggtctgggcttcagcatcgttgggggaaaagacagcatttatggccccattgggatttacgtcaaaaccatttttgcagggggagcagcagcagccgatggaaggctacaggaaggtgatgaaattctggagctcaatggtgaatcaatggctggactaacacatcaggatgctttgcagaagttcaagcaagccaaaaaggggctcctcaccctcaccgtgagaacccgcctgacggcgcctccttccctgtgcagccacctgtctcccccactgtgccgctccctgagctccagcacttgtatcaccaaggacagcagctccttcgccttggaaagcccctcggctcccatcagcaccgccaagcccaattacagaatcatggtggaggtttctctgcagaaagaggccggcgtgggcctgggcatcggcctgtgcagcgttccctacttccaatgcatctctggcattttcgtccacacgctgtcaccaggatccgtggcgcacctggacggacgtctccggtgtggggacgagattgtggaaatcagtgattcccctgtgcactgcctgacgctcaatgaagtctacacgatcctgagtcactgtgatcccggtccagtccccatcattgttagccgacatccagacccacaggtctctgaacagcaactcaaagaagctgtggcccaggctgtggaaaacaccaagtttggaaaggagaggcatcaatggagtctggaaggtgtcaaaaggctggaaagcagttggcacgggcggcccaccttggagaaggaacgagagaagaactcagcacccccgcatcgcagggctcagaaggtcatgatccgctccagcagtgacagcagctacatgtctgggtccccagggggaagtcctgggagtggcagtgctgagaagccgtcctctgacgtggacatcagcacacacagccccagcttgcctctggcacgggagccagtggtgctttctatagcatcctccaggctgccccaggagagcccacccctcccagagagccgggacagccacccgccgctgagactgaagaaatcctttgagattttggtgagaaagcctatgtcctccaagcccaagcctccacccagaaaatactttaaaagtgacagtgaccctcagaagagtctggaagagagagagaactcctcatgctcttctgggcacaccccacccacctgtggccaggaagcgagagagctgctgccactgctgctaccacaggaagacacagcagggagaagccctagtgcctctgccggctgcccaggacctggtatcggcccacagaccaagtcctccacagagggcgagccagggtggagaagagccagcccagtgacccaaacatccccgataaaacacccactgcttaagaggcaggctcggatggactatagctttgataccacagccgaagacccttgggttaggatttctgactgcatcaaaaacttatttagccccatcatgagtgagaaccatggccacatgcctctacagcccaatgccagcctgaatgaagaagaagggacacagggccacccagatgggaccccaccaaagctggacaccgccaatggcactcccaaagtttacaagtcagcagacagcagcactgtgaagaaaggtcctcctgtggctcccaagccagcctggtttcgccaaagcttgaaaggtttgaggaatcgtgcttcagacccaagagggctccctgatcctgccttgtccacccagccagcacctgcttccagggagcacctaggatcacacatccgggcctcctcctcctcctcctccatcaggcagagaatcagctcctttgaaacctttggctcctctcaactgcctgacaaaggagcccagagactgagcctccagccctcctctggggaggcagcaaaacctcttgggaagcatgaggaaggacggttttctggactcttggggcgaggggctgcacccactcttgtgccccagcagcctgagcaagtactgtcctcggggtcccctgcagcctccgaggccagagacccaggtgtgtctgagtcccctcccccagggcggcagcccaatcagaaaactctcccccctggcccggacccgctcctaaggctgctgtcaacacaggctgaggaatctcaaggcccagtgctcaagatgcctagccagcgagcacggagcttccccctgaccaggtcccagtcctgtgagacgaagctacttgacgaaaagaccagcaaactctattctatcagcagccaagtgtcatcggctgtcatgaaatccttgctgtgccttccatcttctatctcctgtgcccagactccctgcatccccaaggaaggggcatctccaacatcatcatccaacgaagactcagctgcaaatggttctgctgaaacatctgccttggacacagggttctcgctcaacctttcagagctgagagaatatacagagggtctcacggaagccaaggaagacgatgatggggaccacagttcccttcagtctggtcagtccgttatctccctgctgagctcagaagaattaaaaaaactcatcgaggaggtgaaggttctggatgaagcaacattaaagcaattagacggtatccatgtcaccatcttacacaaggaggaaggtgctggtcttgggttcagcttggcaggaggagcagatctagaaaacaaggtgattacggttcacagagtgtttccaaatgggctggcctcccaggaagggactattcagaagggcaatgaggttctttccatcaacggcaagtctctcaaggggaccacgcaccatgatgccttggccatcctccgccaagctcgagagcccaggcaagctgtgattgtcacaaggaagctgactccagaggccatgcccgacctcaactcctccactgactctgcagcctcagcctctgcagccagtgatgtttctgtagaatctacagaggccacagtctgcacggtgacactggagaagatgtcggcagggctgggcttcagcctggaaggagggaagggctccctacacggagacaagcctctcaccattaacaggattttcaaaggagcagcctcagaacaaagtgagacagtccagcctggagatgaaatcttgcagctgggtggcactgccatgcagggcctcacacggtttgaagcctggaacatcatcaaggcactgcctgatggacctgtcacgattgtcatcaggagaaaaagcctccagtccaaggaaaccacagctgctggagactcctaggcaggacatgctgaagccaaagccaataacacacagctaacacacagctcccataaccgctgattctcagggtctctgctgccgccccacccagatgggggaaagcacaggtgggcttcccagtggctgctgcccaggcccagaccttctaggacgccacccagcaaaaggttgttcctaaagtaagggcagagtcacacgggggcagctgatacaaattgcagactgtgtaaaaagagagcttaatgataatattgtggtgccacaaataaaatggatttattagaatttcatatgacattcatgcctggcttcgcaaaatgtttcaagtactgtaactgtgtcatgattcacccccaaacagtgacatttatttttctcatgaatctgcaatgtgggcagagattggaatgggcagctcatctctgtcccacttggcatcagctggcgtcatgcaaagtcatgcaaaggctgggaccacgtgagatcattcactcatacatctggccgttgatgttggctgggaactcacctggggctgctggcctgaatgcttataggtggcctctccttgtggcctgggcctcctcacaacatggtgtctggattcccaggatgagcatcccaggatcgcaagagccacgtagaagctgcatcttgtttatacctttgccttggaagttgcatggcatcacctccaccatactccatcagttagagctgacacaaacctgcctgggtttaaggggagaggaaatattgctggggtcatttatgaaaaatacagtttgtcacatg

SEQ ID NO: 3917 - DNA, 3539 bp, Homo sapiens
gattttttcatttttccgggttgtgccgatcccttgggagtggccagacagggtggtggtgactgaagttatgaggacaggaactgggccatgtagcagatactgatggttgtattgatgactttttaaagtgaggtgcacatctggggtcatgacatatagtcatcataagtgtgtgcctgacttttctttaaatttctttatatcggtctccctaaaaacagtgttcacactagtgaacccaccacccaaaccacagacactgatagtgctggacatctctcggtggtgtgccagtttgtaaggctgggcccactttagttgggtcaagaggagggcagagggcattctaagctgaggggtgggagggagcagaggtgaggggctgaactaggccaggacacccagaggcggaaagtctgcgcccaagacagaagggaggcaggagtgggagccggccctggcatccatactctttttctccctgtccccacgctcaccgctccctctgcatggcccaggaggcactctctggtcccacctgctctcccaggcgcactcccgacattctgggctcagctctggctctacccaggagaggatgaaggctcagctcaacccccacctcaacctcctgaccccagcgaggcttccctcaggccatgcccctggccaggacagaatcgccctggagcctcctaggacttctccgaaccttctcctagctggggaggccccatccaccagaccccagagggaggctgaaggtgaacccacagccaggaccagcacctctggctcctcggaccttccaaaggccccaggtggccacctgcaccttcaagctaggagggctggccagaactcagacgctgggccccctcgggggctcacttgggttcctgagggggccggcccggtgctagggggctgtggccgaggcatggatcagagctgcctgtcagcagatggggccggccggggctgtggcagggccacctggagtgtgagagaggagcaggtgaagcagtgggcggcagagatgctggtagcgctggaggcgctgcacgagcagggggtgctgtgccgggacctccaccccgggaacctgctcctggaccaggcaggtaggtgccctcctcacccctcagtggggtggcccccaaagcgtccaggcagaggacgagagatccccaaagtcgaggggacctccaaggttgtctgctcctccctggccccagccagcctttcagggggcctaggctggagtctgttggccgaggctcctgggagtaccctgtgggctctgtgggcctcagagtgctgtgcctctgtggagggtgctgtgcccctgccgagtttctgcccagcaaggccattggctcctaccgcatgactgttgggggaagccctgcaaccccctcccctgtatcagctgtcctcaatctgtcccctcctttttcctcccacacactggaggtcacatccggctcacatattttggccagtggtcagaggtggagccccagtgctgcggggaggccgtggacaatctctacagcgccccagaggtgggtgggatttccgagctgacggaagcctgtgactggtggagctttgggtctctactgtatgaactgctgacgggaatggcactgtcccagagccacccttcaggaatccaggcccacacccagctccagctgcccgagtggctcagtcgcccagcggcctctctgctgactgaggtgaggtgtagcccggccagaggaagcagctgcctagcctgaggaaggtgctgggaggggcacagaactgtgtctgaaccacgtgtgcttcgtgctcagtgtctgatgtgggtgcagagggcagtaggggcaacacatttctatatgttggtggccaaccaccaccaatgttcccagggtaaaatgggggttctgtgggccaggctgccagggagcaggccccctagaggccatagtggttggagtccctggaggtcaccccatgcctccacagctggagtggcccagctgactgggcctctctctgcagctgctgcagttcgagcctacccggcgcctgggcatgggagaaggtggtgtcagcaaactcaagtcccatccctttttcagtaccatccaatggagcaagctggtggggtaagagggcagagcgggtgacggaagcagctggcctggtctggatcgcctctcctccttgcctgacacccaacccagggctggccctctatcagcgggctttgggcgaggaatggagggcactgtctgtcctgctgggctcccactggggcctcagaattatggccaccacccaggaagggccagctcctggaaaagctggaggtgggggcagtcaaggcttgccctgctaagcagcttgaaccatctacccatcagtcaacagacccgttgagcatgtggactcaccatgttaaaggttgccttctgtggcactggcgctgagctgttgaccacctgctgcaccctactgtgaggttctgtgactcactcactgccatgttgtgccccactcaggacatctctggagactcatctcaggacactgatccactggctcagtggacccaaaccagactgtcctggctagtcctcttagtcacacagcgagtaggcctcttccaccagaagctgttcgtgcagctggggaggcccagaagcagggatgccatctgttgtgcagggagggatgaggtaggggacaggatgacccccacccccacccccccacccccgattcctgaccatgccccctatcttgtgatttcagacttgggagagcaaaagggaggggaagaaaataagagtaatggggggaggaaggaatgcatgggtctgccccttagagcaagtctgaaaccagaatcaagagtcctcctccccagtgggcttgtgtgggggaagaggggcagcctgccccaggggtgcaagaggacagcaattcagcttccaggccaaagcagtttagacaaggtgtgcccatcaggactccctctcaggccctggctgtttaccatgtcactgcctactgtgacttcatgcccttttgggataagaaaccacaaaacgcatggaacaactatccatggctcttagccagaaatgtcttgcccctggtctctgaaaagctggggtgagtggttacctcaaagacaattgcctccagtttgggggctcctctcagggttcaccctgtcaccggggcgtgggaccgacctgggaaatttccactagagttttgccctcagctcctccctgccagcatcccagtcaccaccaggtggcgcttctgacacggtccacgtgcctggctctgaaggcccaactgtcagaccagacccctcactcatggtggggagacttgacttcctcgggctcttcaggagactgagacagagaagacaagtgaaagcgcagcctgtacatgactctctgtggtccacgtcctgcctctccctggggtttacacggccccaataaagcctgctctggcct

SEQ ID NO: 3918 - DNA, 5680 bp, Homo sapiens
agtacgcggtcgctactgatcatgcttgggccagggtccaatcgcaggcgccccacgcagggggagcgaggcccagggtcccccggagagcccatggagaagtaccaggttttgtaccagctgaatcctggggccttgggggtgaacctggtggtggaggaaatggaaaccaaagtcaagcatgtgataaagcaggtggaatgcatggatgaccattacgccagtcaggccctggaggagctgatgccactgctgaagctgcggcacgcccacatctctgtgtaccaggagctgttcatcacgtggaatggggagatctcttctctgtacctctgcctggtgatggagttcaatgagctcagcttccaggaggtcattgaggataagaggaaggcaaagaaaatcattgactctgagatcaagacagaaggcgttcctaacactagaaggttcccagtcggtgaccatgattccagattgttctgccggtccctgaagttcctgtaaatggactcgtccggcatgctgccactcctgtctggtctccttccctcagcctgctgttgtgagccccgcggtgctgctgcatgcaccagcaaatcatgtgttcattgcttgctgccactctgctgcctgattgcgctgcaggctgtttacctagtctcatttgggctgcttccagtttggggctattgtgaataaggctgctatgagcattgctggaagacactcacttttctgggatgaatacctaggagtggaattattgggtcgtagagtacatgtgtgtagcttcagtggatgctccaaacagatttccgacttggtttggttggccccatgtttactctcacaagttgtgagcattcccgatccacatggaggccagcacttcattgtgtcagtcttgttgttgttgttgttgttgagatggagtctctctctgtcgcccaggctggagtgcagtggcacgaccttggctcactgcagccttcgcctccctgttcgagcgattctcctgcctcagcctcccaagtagctgggactacaggtgcccaccaccacacccactaatttttgtattattaatagagacagggttttgctatgttgcccaggctggtctcgaactcctgacctcaagtgatccacccgcctcggcctcccagagtgctgggattacagatgtgagccgccgcgcctagccagttcactttcttaatgatgtcttttgatgatggaaagtcctaactgtaatggagctcgctttcccaatgctgactcttatggttagtgcctttggagtttaagaagcatttcctgctccaagatcatgaagatactctcctctgtcttatggaagcttggttatttttgccttcacatttagatctttcatctaccccagatgaatgctacctgcttttaccctgagaactgtgtttggggggaccatgtacccctgaggggctcttcggggcacacagctcttctcttaccatgggcctcagaggcaggcccggagtgagtttcagactttgtgagtgaagcccttcaaaacacgaaatattcccagaaacccagtaagtgcagcagacctactctaactgggggcagtgggaggacgcccacatcctgccccctcagcccctctctgacaccccagggtggccctgaatccaggggccctaggagcccagctttagaatcaccgcgctgggtactcgatggagcttgtctctgatgcagaacactcctagcattctctctcagggctcttttcatttgaatgacctagaggattgagctcatgtaggcactgaaggcttccacctctcccatacccgcaaggccgatctgccttcagctcccagcaagtgtggggcagcgcgggccacagagtagggtgcagggatggggcccctgcagcacccagggtctctggtatggagacagcagtgtggagtctggaaactcagagtccttctggctgccgccgcggctttaccatctggagagccaccacgctgaagcctcctccaccctgagcgcttggctggcttcaggcctgtctcaagatgcaaggagaggatacaccaccatcctgctggctgctctgagtgtcacccccctgaaagcagcacagggtgcccctcccatcctggcaccccctacttctcccccagtggatgcagaatgtgctgggccaggtgctggacgcgctggaatacctgcaccatttggacatcatccacagacccctttcgtaagtcctggatggcccctgaagccctcaacttctccttcagccagaaatcagacatctggtccctgggctgcatcattctggacatgaccagctgctccttcatggatggcacagaagccatgcatctgcggaagtccctccgccagagcccaggcagcctgaaggccgtcctgaagacaatggaggagaagcagatcccggatgtggaaaccttcaggaatcttctgcccttgatgctccagatcgacccctcggatcgaataacgataaagtctgccgtggcccccggagctggtggaggtggtggtcacgaccatggagctacatgacagggtcctcgatgtccagctgtgtgcctgctccctgctgctgcacctcctgggccaagcgctggtgcaccacccggaagccaaggctccctgcaaccaagccatcacctccaccctgctgagtgctcttcagagccaccccgaggaggagccacttcttgtcatggtctacagcctgctagccatcaccacaacccagggtgtgtctgccagccacctcctgccccacccacgctccaggacagcccttcccaggggtcttggaagggttggtttggggtataggtgggttggacgggacagtgctgggcctcctcctgagatacatggtggcatttggccgtcttcatttggccaccccaaatgctggtcgcatccttttccatcttgatgacaagcttccactcttgaagtcactggttccctctacagacatgctaggcgcagctgtgggcttcacaccaatgacatctctttcccacacttcctgccccttctgggaggctggggctcaaatgccctgtgtgtctccattccatagggcccagtgggcttccgaagccgccagccaggactgtgggaaggagagggccatacagagcgctcacaccttcacccacaaatcgggtgggcactgttctccccaacaggaagctgggcctcgagagagcctaaggacagttgccaggagtccatgcagcagggttcagggctggggtctgggccccagcaccctctttactgcacagactggataactgatgatacatggctgatctcactttggggagtgaaaggaggcactaggaatagatgtcaactggaaccctcaggcaaaatggatgtcagttcatcctaccgggatagggccccgtcatggttccatcctggaaggcacaggctggctctgtgagcccaggaggcagggtcaggccccctggatgggaagctacagaggtcagacccagcctggtagtgggatggcagctattgggactggtggtccacgagatggacagactcctctggggccagtcccacatcctcctgttcagggctccattgagtgcacacgacttggcccagagcaggcacctaggattgcaggtcaaatgggactgcagtgcccaaggacaacagaggcaggaaggcttcctggagggaggggccctggggccctcattctggctcacccacagagtcagagtcactgtcagaggagctgcagaacgctgggctgctggagcacatcctggagcacctcaacagctccctcgaaagcagggacgtctgcgccagcggcctgggcctgctctgggccctcctgctggacggtgaggggccctcctcctgctgtcccaccggggctggcagccctcccccagcccctccctaactgcccctgagagccttcgaggacctccatgtcctgtccctaaaacacaacagccatagtccgggaaaggctcttctgagagcttccaactccaacagaagaaaatcgaggagcagagagagaaaaggcaggggagaaaggccttctggcagaggccgggtttcaggacttcttgcccagtgggcagacccctcagttttaagtgcctcctgcccagggaaatgtcctgggattttccgggcagtcctggttccagagggcagcggtggtgtggtgctggatgccctgtttgttttgatttttgattcacagtagggggccccctggcctgtgctgcttcctctcctctagaccccatcttggcactccagcgccccaggaaaaagagagctccaaaccacggaaagcccgggaaacccaagaaccctgccagcacccaaagtgtgggattctccaagcctctcctgggctaacccctgcacccgtctctgaggacagttgacctttcccaccccatttctgctgttgtcgttagctggaggaaggcagcagatgggggatgggaaggcccccctgcacacacccaaggcctgggtgtccccttccatccctgtcctcgttccaggtatcattgtgaacaaggcccccttggagaaggtcccggacctcatcagccaggtgttggccacctaccctgcggatggggaaatggcagaagccagctgcggagtcttctggctgctgtccctgctgggctgcatcaaggagcagcagtttgaacaagtggtggcgctgctcctgcaaagcatccggctgtgccaggacagagccctgctggtgaacaatgcctaccggggactggccagcctggtgaaggtgtcagagctggcggccttcaaggtggtggtgcaggaggagggcggcagtggcctcagcctcatcaaggagacctaccagctccacagggacgacccggaggtggtggagaacgtgggcatgctgctggtccacctggcttcctatgaggagatcctgccggagctggtgtccagtagtatgaaggccctgctccaggagatcaaggagcgcttcacctccagcctggtgagtgacagcagcgccttcagcaaaccaggcctccctccaggtggaagcccccagctggggtgcaccacgtctgggggactggaatagatgtttgtatggaactgaccttgatctccacgtgtatagttttcaagactgctctcctgcctgcctattatcccatctctatgactgggccaaaatcaatcttaaacgggaggggtaatcagacctctccaaagagtttcctgtccatgactgctggattgagtcacatgagtaactgctcctggacccggggactgtccacgaaaactgacttgcctgcttcctccttccaggaactggtttcttgcgcggaaaaagtgctcttgaggctggaggcagccacctctcccagcccactgggtggggaagcagctcagccctgatgcgggggagaagacagataccccacaggcccctccctccacgtgtgccctctccctgtccttcctttccatgggccactgtttcccttggggtggggggaagggtcatccagcaccagaatgcgcacctcacactcctcttaggtgactaataaagaggcccaaggcc

SEQ ID NO: 3919 - DNA, 3590 bp, Homo sapiens
aatcccagcgctttgctggaggatcgcttgagcccaggaattcaagaccagcctgggcaacatggcgagaccctgtctgtcccaaaacaaaaaaacagattttaattggtttgggatgcggcctggacacagggaaattttaaagctctctaggtaactccaatgtgcgtcgaggttgcgaaccgccggcctgtcacacagagggagctcaggagatgctgagagtgggaggatgccggcttgggagcctggagttgcagcttcctgcggctggcgcgcccctccttgctcccctctacgcctctgcatcgcaccccacccctgtaccccaccttcctcccaccaaggaaacctcacctgccgcctcccgcccaggtcctttggattttgccggtgtgtgtgggtgcgcacaagaggcccctccctgccaggagagcaggtgagcctggccgcgcacgaatccgagggggcggccgcccagctgggaagcagccctgaaatagacccccgccgcccccgctgcctccttccggaatctgctcagataccccagatcagctacgcctccacagcgccagacctgagtgacaacagccgctacgacttcttctcccgcgtggtgccctcggacacgtaccaggcccaggccatggtggacatcgtccgtgccctcaagtggaactatgtgtccacagtggcctcggagggcagctatggtgagagcggtgtggaggccttcatccagaagtcccgtgaggacgggggcgtgtgcatcgcccagtcggtgaagataccacgggagcccaaggcaggcgagttcgacaagatcatccgccgcctcctggagacttcgaacgccagggcagtcatcatctttgccaacgaggatgacatcaggcgtgtgctggaggcagcacgaagggccaaccagacaggccatttcttctggatgggctctgacagctggggctccaagattgcacctgtgctgcacctggaggaggtggctgagggtgctgtcacgatcctccccaagaggatgtccgtacgagaccgtgagcgaattgggcaggattcagcttatgagcaggaggggaaggtgcagtttgtgatcgatgccgtgtacgccatgggccacgcgctgcacgccatgcaccgtgacctgtgtcccggccgcgtggggctctgcccgcgcatggaccctgtagatggcacccagctgcttaagtacatccgaaacgtcaacttctcaggcatcgcagggaaccctgtgaccttcaatgagaatggagatgcgcctgggcgctatgacatctaccaataccagctgcgcaacgattctgccgagtacaaggtcattggctcctggactgaccacctgcaccttagaatagagcggatgcactggccggggagcgggcagcagctgccccgctccatctgcagcctgccctgccaaccgggtgagcggaagaagacagtgaagggcatgccttgctgctggcactgcgagccttgcacagggtaccagtaccaggtggaccgctacacctgtaagacgtgtccctatgacatgcggcccacagagaaccgcacgggctgccggcccatccccatcatcaagcttgagtggggctcgccctgggccgtgctgcccctcttcctggccgtggtgggcatcgctgccacgttgttcgtggtgatcacctttgtgcgctacaacgacacgcccatcgtcaaggcctcgggccgtgaactgagctacgtgctgctggcaggcatcttcctgtgctatgccaccaccttcctcatgatcgctgagcccgaccttggcacctgctcgctgcgccgaatcttcctgggactagggatgagcatcagctatgcagccctgctcaccaagaccaaccgcatctaccgcatcttcgagcagggcaagcgctcggtcagtgccccacgcttcatcagccccgcctcacagctggccatcaccttcagcctcatctcgctgcagctgctgggcatctgtgtgtggtttgtggtggacccctcccactcggtggtggacttccaggaccagcggacactcgacccccgcttcgccaggggtgtgctcaagtgtgacatctcggacctgtcgctcatctgcctgctgggctacagcatgctgctcatggtcacgtgcaccgtgtatgccatcaagacacgcggcgtgcccgagaccttcaatgaggccaagcccattggcttcaccatgtacaccacttgcatcgtctggctggccttcatccccatcttctttggcacctcgcagtcggccgacaagctgtacatccagacgacgacgctgacggtctcggtgagtctgagcgcctcggtgtccctgggaatgctctacatgcccaaagtctacatcatcctcttccacccggagcagaacgtgcccaagcgcaagcgcagcctcaaagccgtcgttacggcggccaccatgtccaacaagttcacgcagaagggcaacttccggcccaacggagaggccaagtctgagctctgcgagaaccttgaggccccagcgctggccaccaaacagacttacgtcacttacaccaaccatgcaatctagcgagtccatggagctgagcagcaggaggaggagccgtgaccctgtggaaggtgcgtcgggccagggccacacccaagggcccagctgtcttgcctgcccgtgggcacccacggacgtggcttggtgctgaggatagcagagcccccagccatcactgctggcagcctgggcaaaccgggtgagcaacaggaggacgaggggccggggcggtgccaggctaccacaagaacctgcgtcttggaccattgcccctcccggccccaaaccacaggggctcaggtcgtgtgggccccagtgctagatctctccctcccttcgtctctgtctgtgctgttggcgacccctctgtctgtctccagccctgtctttctgttctcttatctctttgtttcaccttttccctctctggcgtccccggctgcttgtactcttggccttttctgtgtctcctttctggctcttgcctccgcctctctctctcatcctctttgtcctcagctcctcctgctttcttgggtcccaccagtgtcacttttctgccgttttctttcctgttctcctctgcttcattctcgtccagccattgctcccctctccctgccacccttccccagttcaccaaaccttacatgttgcaaaagagaaaaaaggaaaaaaaatcaaaacacaaaaaagccaaaacgaaaacaaatctcgagtgtgttgccaagtgctgcgtcctcctggtggcctctgtgtgtgtccctgtggcccgcagcctgcccgcctgccccgcccatctgccgtgtgtcttgcccgcctgccccgcccgtctgccgtctgtcttgcccgcctgcccgcctgcccctcctgccgaccacacggagttcagtgcctgggtgtttggtgatggttattgacgacaatgtgtagcgcatgattgtttttataccaagaacatttctaataaaaataaacacatggtttt

SEQ ID NO: 3920 - DNA, 4135 bp, Homo sapiens
agaaaggcaggaagagaagcagtgaaggcagagctcactggcccagctcagcagggcttaagagaggcctctcccctggtgatgtgtgtctgaggatgagggccccctgctttcttgggggcagtgtctaccaggatcctctgctctggaactcagaaaggaaagagggctcttggagtagaaggcaagctcctgggaagtcaaggcagccagagatagctctgggtgccggcacctcggaagcagccacccttcatggagaaggggacagagctgctggtgtccccatcccagagtggacctgggggcgatcagcccctcctcgtgaagcacagggaggacagcgccgtggtactgagtctcatcgacactattgacaccgtcatgggccatgtatcctccaacctgcacggcagcacgccccaggtcaccgtggagggctcctctgccatggcagagttttccgtggccaaaatcctgcccaagaccgtgaattcctcccattaccgcttcccggcccacgggcagagcttcatccagatcccccacgaggccttccacaggcacgcctggagcaccgtcgtgggtctgctgtaccacagcatgcactactacctgaacaacatctggcccgcccacaccaagatcgcggaggccatgcatcaccaggactgcctgctgttcgccaccagccacctgatttccctggaggtgtccccaccacccaccctgtctcagaacctgtcgggctctccactcattacggtccacctcaagcacagattgacacgtaagcagcacagtgaggccaccaacagcagcaaccgagtcttcgtgtactgcgccttcctggacttcagctccggagaaggggtctggtcgaaccacggctgtgcgctcacgagaggaaacctcacctactccgtctgccgctgcactcacctcaccaactttgccatcctcatgcaggtggtcccgctggagcttgcacgcggacaccaggtggcgctgtcgtctatcagctatgtgggctgctccctctccgtgctctgcctggtggccacgctggtcaccttcgccgtgctgtcctccgtgagcaccatccggaaccagcgctaccacatccacgccaacctgtccttcgccgtgctggtggcccaggtcctgctgctcattagtttccgcctcgagccgggcacgaccccctgccaagtgatggccgtgctcctacactacttcttcctgagtgccttcgcatggatgctggtggaggggctgcacctctacagcatggtgatcaaggtctttgggtcggaggacagcaagcaccgttactactatgggatgggatggggttttcctcttctgatctgcatcatttcactgtcatttgccatggacagttacggaacaagcaacaattgctggctgtcgttggcgagtggcgccatctgggcctttgtagcccctgccctgtttgtcatcgtggtcaacattggcatcctcatcgctgtgaccagagtcatctcacagatcagcgccgacaactacaagatccatggagaccccagtgccttcaagttgacggccaaggcagtggccgtgctgctgcccatcctgggtacctcgtgggtctttggcgtgcttgctgtcaacggttgtgctgtggttttccagtacatgtttgccacgctcaactccctgcagggactgttcatattcctctttcattgtctcctgaattcagaggtgagagccgccttcaagcacaaaaccaaggtctggtcgctcacgagcagctccgcccgcacctccaacgcgaagcccttccactcggacctcatgaatgggacccggccaggcatggcctccaccaagctcagcccttgggacaagagcagccactctgcccaccgcgtcgacctgtcagccgtgtgagccgggaggctgccaaccaggccaggctgcgctcagaacacacccccccaaacagaatgaaatgccccacctttgcccatggaccctctccttgctgctgtctggacatgggtgttgtggccccgagacagctgtcctcccctgtgactctggctgtcggagcacactgctcagcccagcagcctgatgcccaggccagcgtgggccctcctgccttgcatccacccgtgggctgagtgacttcctcgggggattcccaggacacagtggcctgactgtgatggtgcccttgagcctcccttcatcactcagcatcagacccagcgaggccaggacactcggggccggtcccgcagcaccaggaggggatgttcagcctctgtgccttggtggggcttggggactcagggccaaagaggtggttcaggtccccacgcaccctcagtcaggcgcaggcagctgggggtgtgtggggaagagcatgcggagtccccagtgtctgaatccactgagtggtgagttccccacagccggcgctagccgtggtgtgtgtctctgtaggtggtgccggcgtgggccaacctgtgctgtgtcatcagttgggggcccctgcccaagccgagctcgagccgtgggcgggagtcgttgactctccaggtgagggcgacccctctgccctgtccttgggggggtcccctctgctcacgtgaagagccgctctgggccttgaggctgcctgatggtgcctgtgcttgggggagcttctcggccatccgctgtgagttttgcctctttggaccccaattcggccttaagatgccctcctccctcgtgtgccagcctccttggttgttcttgggccacaggagctggccgtgtccccgcagtgcctggtgtccaggtggaaattggagggcattttccagggcactgctttccccagaggcttcctcatggctcacaggcactctacgaagtttctaatgggcagaccacgcggcaggtagcacagtgcgctccgtctggtcaccatgagaccgacctgcgctgagtccccactgacctggagagggagggctggtgacagccgtgtcttctgtgttgagggaaatttatggactcagattcagccccagaggagatgggataattgttatggacccatgtgtgggcatgatcctgtggaacacaggtttgggatcatagatgtgaattaagacaccaccgagatacgggctgtgaggttcatactgtgctgatagcactcgtggtgtctgtgaaatgtgggtaagacattcaaacctggttttgatactggaaactcttcctttaaaactgtgaccatgatttcattcagcccctccacacccctatgtctgccttgtttcagagtgagttttctatggagcctgtggcccttttgcagcccacctggtggcttcttaatgtaactcttcccctggtcgcctggagtggaccactcatctgcaggcctctcctgcatggggagggtaggcagggagcagcatgtctgcaggggtgaacctttgctcttctgtcaggcgaggcccaggctgcaccagccacctgccacatggtgacagtgccacgggccctgcgtatggcccctgcaaccgtgctctggcgggcacacctggctgctgcaggccaaggccgctgttcagtgaagagtcccatgtttagtatggactaaagtcccatgtttagccactgccccaggctcccgtgaccccagaaaccaggtcacatggaccacagtgccagatcctcatcacgccggtgagcacctagaagtgagaacactgtattcctacaatgtacacttggatatttctccttatttagtttctagtgaaacaaatcaagtaaggaactatctttagtttagatggaattatttgtttttaattgttgccgtattcatctatatagctaatatttcaagataagtaatgaacaaaacctgtctaaaccttttgtttccaatgaatgaaagtcatgcactttatttataggctctatgttttggcttctgcagtacttttattatctatacataatttggccaaaaataagaaattggaaagaatgaaatgtttagtttatagtagaagaaagatgatgacactaagttgtgaaaatatgttgtgatttttatgaaataaactcatgtcct

SEQ ID NO: 3921 - DNA, 3811 bp, Homo sapiens
tataaacaggaaaatttaaatattgtagttagagtttttttcttcttcttagagatggggtttcactctgtctcctaaggctggagtgcagtggtgggatcatagctcacttcagcctcaacctcctgggctcaagccgtcttcctgcctcagcctcccgagtagcacgcatcaccagcccagctaattttctgtcttttttttttttttttttgtagagacggggtctccctgtgatgcccaggttgttcttaaacttctggcctcaagtcatcctcctgtctcagcctcccaaagtgttgggattacaggcatgagccaccgtgcctgcctgcagttaaacattcccccacaaaatactgggccacaccgaggctagtatgaaagttgcagccctgggtatgtgtgacctgagagccccttggcagccatggggagcgatgggggaagctggggcactgggaaggggtctaggcacacgagccctcgggtcctcacctcccacgaggcagggtcccaggctgcctctactcaaggtggggcagcaaaagaatcgccctctagctgtgcagaccccctccccctccaggtctgcacaccgcccaaggctggccctggacttctggtggattcaagtactcaggtggggagagtaggaggccagtcgcacggagccctccccaacgcacagtgcctgcccagctcaggtgcctctgaggtgtagattctgagcaggttctgggatctcctggcccccagcgggggctgccacaggagtataggcccaacaggaagggaagatcccagcgattggttccagtgggttctggggatgtcctcggagcctggcctggctcagggtccctccaaaagtccctggaacgagggtgaagtgttgctcatgaatcagagagaaagcaagcaggaccctcaagaagggaggagagagaccattgggcgtgcagcactttgcactcgggggaagggctcctgaaacttggaagtcagcaaatatctgctgtacttcaccagaggtgggatctaaggagacagaatgaagccagggggcagaatgtttcgtttctgtctgaaacctgtgccctgcatccctcatggactggggacctggagttcccggggaccaccgtggggaaatgcgtcccagcactaatggtccccagcagctgcagtcacggggtttgggcgctctcccctcctgatttgggggaccttttgtgctcctctgggcagagggaggaggcagagggaggaggaaggcccttcgctgtgggctgagtccttcccaccttccataccagcccagcaggaagccactgcaggatgccccagaggacagcctgatggttgggggagaggcttctcccgccctcacccctccgggttcttcctggacccactgagtaacccaggtggtgggacgtgtggctgtgagtcctggactctgggcgctcaccagcagctccgtctcacacctgcctgcgtgtgacaccagcaccccttatgatgaggaaacaagtttgcccagctgcaggggtggccgagtcaggatgactctagcccgtgtcctggacaccagaccctgcccaggtccagccggggctggtctcagccttcctgggctatgtcgcggagggtgttggggacagcgagaggctggcgtggacagtggaggggtgactttgtgggtggtcctgatagtgacggagaggaggatactcagctccacccctgggcggcccctgagcagcacggctgggcctgaaggggcagggctgccgtcacaggctctggcccctgggagctcaaggggtgaatccctgatcccaggtgtgggactgggatggggcctcaggctgatgcaggcaggacctccagagctcaggactgggtgggtgggctcacagggaggtaggggcaggccagagtcccagctgtcctggactctgctgtggggaagggctgatgcaggtgtggagtcaaatgtgggtgcctcctgcagccgggtgccaggaggggtggaggggccaccctgggctttgtccgggagcctggtcttcccgtccttgggctgacaggtgctgctgcctctgagccctccctgctaagagctgtgtgctgggtaaggctggtggccctttgggctccctgtccaggatttgcgctctggagggtagggcttgctgggctggggactggaggggaacgtggagctccttctgcctcctttcctgccccatgacagcaggcagatcccaggagagaagagctcaggagatgggaagaggatctgtccaggggttagacctcaagggtgacttggagttctttacggcacccatgctttctttgaggagttttgtgtttgtgggtgtggggtcggggctcacctcctcccacatccctgcccagaggtgggcagagtgggggcagtgccttgctccccctgctcgctctctgctgacctccggctccctgtgctgccccaggaccatgaatggcacctacaacacctgtggctccagcgacctcacctggcccccagcgatcaagctgggcttctacgcctacttgggcgtcctgctggtgctaggcctgctgctcaacagcctggcgctctgggtgttctgctgccgcatgcagcagtggacggagacccgcatctacatgaccaacctggcggtggccgacctctgcctgctgtgcaccttgcccttcgtgctgcactccctgcgagacacctcagacacgccgctgtgccagctctcccagggcatctacctgaccaacaggtacatgagcatcagcctggtcacggccatcgccgtggaccgctatgtggccgtgcggcacccgctgcgtgcccgcgggctgcggtcccccaggcaggctgcggccgtgtgcgcggtcctctgggtgctggtcatcggctccctggtggctcgctggctcctggggattcaggagggcggtttctgcttcaggagcacccggcacaatttcaactccatggcgttcccgctgctgggattctacctgcccctggccgtggtggtcttctgctccctgaaggtggtgactgccctggcccagaggccacccaccgacgtggggcaggcagaggccacccgcaaggctgcccgcatggtctgggccaacctcctggtgttcgtggtctgcttcctgcccctgcacgtggggctgacagtgcgccttgcagtgggctggaacgcctgtgccctcctggagatgatccgtcgcgccctgtacataaccagcaagctctcagatgccaactgctgcctggacgccatctgctactactacatggccaaggagttccaggaggcgtctgcactggccgtggctccccgtgctaaggcccacaaaagccaggactctctgtgcgtgaccctcgcctaagaggcgtgctgtgggcgctgtgggccaggtctcgggggctccgggaggtgctgcctgccaggggaagctggaaccagtagcaaggagcccgggatcagccctgaactcactgtgtattctcttggagccttgggtgggcagggacggcccaggtacctgctctcttgggaagagagagggacagggacaagggcaagaggactgaggccagagcaaggccaatgtcagagacccccgggatggggcctcacacttgccacccccagaaccagctcacctggccagagtgggttcctgctggccagggtgcagccttgatgacacctgccgctgcccctcggggctggaataaaactccccacccagagtc

SEQ ID NO: 3922 - DNA, 2615 bp, Homo sapiens
agaaatgtttcgagctggggcagagggagcagagaaggagccctcaccgcggccggaatgcagagcggaccctggcccaggactgggtttccctttaggctcgggcctaccctggccctcgctgttggaatctccaggaggccgcattttagatatcccctgcaaagtgtgtggcgaccgcagctcggggaagcactacggggtctacgcctgcgacggctgctcaggttttttcaaacggagcatccgaaggaataggacctatgtctgcaaatctggaaaccagggaggctgtccggtggacaagacgcacagaaaccagtgcagggcgtgtcggctgaagaagtgtttggaagtcaacatgaacaaagacgccgtgcagcacgagcgggggcctcggacgtccaccatccgcaagcaagtggccctctacttccgtggacacaaggaggagaacggggccgccgcgcactttccctcggcggcgctccctgcgccggccttcttcaccgcggtcacgcagctggagccgcacggcctggagctggccgcggtgtccaccactccagagcggcagaccctcgtgagcctggctcagcccacgcccaagtacccccatgaagtgaatgggaccccaatgtatctctatgaagtggccacggagtcggtgtgtgaatcagctgccagacttctcttcatgagcatcaagtgggctaagagtgtgccagccttctccacgctgtctttgcaagaccagctgatgcttttggaagatgcttggagagaactgtttgttctaggaatagcacaatgggccattccggttgatgctaacactctactggctgtatctggcatgaacggtgacaacacagattcccagaagctgaacaagatcatatctgaaatacaggctttacaagaggtggtggctcgatttagacaactccggttagatgctactgaatttgcctgtctaaaatgcatcgtcactttcaaagccgttcctacacatagtggttctgaactgagaagtttccggaatgctgccgccattgcagcccttcaagatgaggctcagctaacgctcaacagctacatccataccagatatcccactcaaccctgtcgctttggaaaactcctgttgcttttgccagctttacgttctattagcccatcaactatagaagaagtgtttttcaaaaaaaccatcggcaatgtgccaattacaagactgctttcagatatgtacaaatccagtgatatctaagctcacaagatacccacttttcaggatgggacagtatcagatgaacttcaacccatggagaacaagcctcaactaacaaacccttcaggaagcatataccggggaatgtgtagccttcaggaaaaaaatgccaattgacacaaagcattccagtagctatgacctgccgccctgaccaggatagggcgggtgggaaggagaggggtgcaacaggaccgcctgcactgaaaactcactgctgccatgccctgggagggggcaaactgggggttgccacaggccgtgccattctgcctcttacctggaagatcaggctgaacgatcaaaagctgaaacataagtagtgctttctcttcctttttagcatacaaagtttggtaaccaaatatagctctgtgtataacatcgtactgcggccttcaaaactacgttatgttggagcatttattttaaaaataatggtaggttttaaattaaaagtgttatcaaaagtttcccctctattgtaatacattattaagtggccttcagaactgagttaataagtgaaaagtagcttatgccatgtgatttgctttttctctatcttcttttttcttttctttctctttcttttgttctttcttcttcttttttaataccataggccaggcaaccttgtcaaaggaattgatggacaaaatgagattctcaccaggacttcaggttggataacatgtcaaaaagagaagagctttactaaaagaacataagtcaagggaggatgaataaaaacagcaaaaccaaataaagtggagatgagtgattgagtgaggtagattgctgtcccgttaacatagtgctgaaaccaaaggcagtgggggtccaaactcgtggtgcagcaagtcacaccagacaggaaacgaatatggacgtaattgcagaaggaacttcaaggagatgaatgaatgctaaaagggttcttgactgatccattgctaacagcctgagactcttcaatgcctttccgaaaactggtttctagtaaagccttgaatgaacacacacacacacacacacacacacacacacacacacacacacacacacacaccgtcctacactttaagctgctcctttggtatgactctatacttatggaaatgtagaaacaaacatttttaaatagctgctgtacttttcacattttgatttattaggtactagcactgaggaaaaaaattcagcacttggactatcataggatgagtaaaacttttcttgtacaaagtgaattaactgatttgtgaagttaaaaggttgtactcattgtatttacaaagaataaaaatatattgaattt

SEQ ID NO: 3923 - DNA, 3794 bp, Homo sapiens
ttgggtttttaatacaggtcgagagctatgaattttgattttccttttaaaaagggatcaggaatacctctactaacaaccaatttgtccccacaatgcctctccctcctgcacgcaatggtggcctatgatcccgatgagagaatcgccgcccaccaggccctgcagcacccctacttccaagaacagaggtaggcactctcgtgggttcggtggggcagatgcaggacctggcaaatgagacccatgggcacatggtggggcaaggtactgccccctggagggtccctggttcttgggaatcgcgctctctatcctgaagagtggtcagggcctcttggggcccacaccgtgctgacttctggtgtatcctccccaaaatgaggatgttagcagctccacggcaggagaaagaggggctggctgtccactttgcggttgatgccaaggctacaggtagtaatccttctagaagagcctggtgtgcggcccttgtaaatggtgtgaacaggatgcattctgagatggtagagcactgtggatgtcacctggcgctggaagtacctgctgaatgtgaatctaagacctgtctgccctgaggtcacctaattccggacctctggacactcctgtttgcctaactgtggaggtgacagtttgatctgaaactgcgagtccctgggtaggcagcgcttctgattcatggagccagctctgttcctggcccagagactgtcaggctgagacagaaaagaaaaaaaaaggctcctgattacagctcaggcagaaaagaagagctagtgacaactcacacagtagacaaattggagacaaagaagccagtaggccgtgtgctctgcgggctctcagtggagctgctccattctcttctccttccccgtaggaaaacagagaagcgggctctgggcagccacagaaaagctggctttccggagcaccctgtggcaccggaaccactcagtaacagctgccagatttccaaggagggcagaaagcaggtactaagcgaaatcggagccggagactgcctagctcagccgggactggatgccctcgggtggcctgtgtctctctcaggaggacgccacctgtggaggctgtggcagaccacattgtcagtcgaggcctgaacagcatgcgagttgatggctccatgtgttgggacatcagggaccccagttctatttgctcaagccctttctgccccagtagctaagaattgatgacgaatatcccatgtgagcaggcccagagaggggatgtttgcatgaacttttgtgtctgtcctgatgaccatatgcaggtgccaggttctatgccaaagcaccgtgcagacatcgcccctcagaacggccctggagggaggcgccaagaagatgcaatgctggcccaagtcacccacccagccagtgacaggtctcaagtcactgtctctgcctggctccagatgagcacttcgtcccatcagcagaggttgtgcacattttcggttgagaaatgccagctttgcccctcagtgccttcaccttcccacctaccgtgtggcatcctagcctggtgcagccctgtgtcacctgctggcagggtcacaccagtctcccagttctgggctggcaccccaacagtgtgacagtgtgcccttccatcattcgtctgttcggtcgtccgtacgtcactcgctcctcccagcctttaccgagtgctccctgaccgcttgggagctgggaacccagagctgcagtcaggctgctctccagaaagccaggctcctgtgtcccattggtccctgatttgacagctccacttgaatgtccgaaagacagacttgctgaaaccccttctcctgatctttccccaaacgtgctttttccctgtggcttcccatggccttccctccgagggaggcaactccgtcaactgcccaggccccccgtggacccttccttcatcccacaggggcttcgccttcttgcctcctacatcctcctcaccttgcctaagtcaccacagatggcctcctcactactgtccctgctctgcctccgctccctcctggacagagggtctgcttcaaacccttgatgtcactcctggccggcattcacccaagtccccaccctcagtcacatccgaggtcggcatatttttctctaagggtctgataggaaatattttaggccccgtggccgtggggtgttcgttacactccctgctttgctgcagtgtgaaaggagctggaggcaacacatgaaccacataggggctgcgttccagtagaactggggacactaaaatttgaatttcacataattttcacatgccatgaaacatttttttttcagtcattaaaaataaaaaccaggtgggtgcggtggctcacacctgtaaacccagtgcttagggaggccagggtaggatcacttgaggccaggagtttgagaccagcctgggcaacgtaggcaagaccactgccccaccaccccatctgttttaaaaattagctgggtgtggtgcgtgcctttggtcccagctacttgggaggctgaggcaggaggatcgcctgagcctaggaagctgaggctacagtgagccaagattgcaccactgcactccagtctgtgctacagagcaacaaacaccgtgtctcaaaacaaacaaacaaacaaaaaaccccaaatgtaaaaccatccttagctcacaagccacccaaaaccaggcgacaggcagatcagggtgtgagaccttggagctagagcaggaggcaggaggcgtgggcaccacagcccgcgagccctttgccgcccgcactgctcagcttgcagtcggcattcttcaggttccccctgaaggtttggcctcccccgtgggactctagtgggcagccactcccttggggtgtctgggacctggtggatgtgtcccagtcacatcttatggtcaagaaattgtattaggcaaaagcagtacaaaagagcctctttcgtttttcctaatttccataaagcagaaagcgttttatgtccaactggcctctgttctgtttcaagaaacagtccctaaagcaagaggaggaccgtcccaagagacgaggaccggcctatgtcatggaactgcccaaactaaagctttcgggagtggtcagactgtcgtcttactccagccccacgctgcagtccgtgcttggatctggaacaaatggaagagtgccggtgctgagacccttgaagtgcatccctgcgagcaagaagacagatccgcagaaggaccttaagcctgccccgcagcagtgtcgcctgcccaccatagtgcggaaaggcggaagataactgagcagcaccgtcgtctcgacttcggaggcaacaccaagcccgaccgggccaggcctgggtgatctgctgctgagacgccacggagggctggggatgcgcctgcgtccgtttcgcgctggccggggctctgggtgctgccctgcgccctgccgcacccgcggcccgcgcagctgcctaggatgttctgggctaatatacttgtaaaaccaccgcattctagggttttctttcattttcgttaagaatttggggcaggaaatactttgtaactttgtatatgaatcaaaacaaacgagcaggcatttctgtgatgtgttgggcgtggttggaaggtgggttctgcgtgtcccttcccagcgctgctggtcagtcgtggagcgccatcatgtcttaccagtgacgctgctgacacccctgacttttattaaagaataagctgtcgtt

SEQ ID NO: 3924 - DNA, 4147 bp, Homo sapiens
ctcggcgcccggggccggctgcgggaaacgctcgcacagacagagacaggcgcgcacccgggggcgcacccggggccacacacgcctccccaggcgatggggtccaggcggccccgcccgaatgcttccgtccggccagcccatccagccgctgccccgcacctgtccccgccgctccggacccgcggccgccccccgcgcacgcacaccggggacgggacccggcgccgcgactccccacgccccgcaggcgacgccaccttcggccgtagcagcccggggtccgaggcatcccccctcggagctggcgcgggacccagcgaacgggccccggggcggagggacgcttcgggaccccacagccgccgtgggtcgggcaccgggggctccaggaggctcgcggaggggtcgccactcaccagctgaaaagcgcagaggacgacgagcgcgcagcggccggagcaggagcccatggtgcccgcctatacaggaggcccccgggtgccccgcgctcggcccccgcccccgctccgcccgctccccacgcgccgcagcctcgaccccgccccctccgcatcccgttcccccctcctccccgcaacccccggcccagccccagccccgggtaacagctgcgctgcgtctcccctcccacccccgcctgcggcccctgggggcttcgcgccggccggagagggggacccttcttaaaggggcgatggcgcggcctctcgggtagcgaggggcggcgccgcggccccaggacagacctgcagctgaggggagcccgccccggacgcggcagggatgaccggcgtccgccccctcctgcaggatgacctgcccagcacctgctcccgccgtgcgccctctggcgtgagatccccatcaaccttccccgtgtggggtctgagcgacccgcatccgcgaggcgttttctctgagagtctcagagattccttggcttggagaagtcctggacccgggtccagagctcagaggtcccctccacgggcgggcgggccgaggactcaggaggagggagtgagccgggctcgcccacctcccacagggagctcctctgctggaaggctgagacctgaaggccaggtctgctccaactgcctggaccggcctcctgcctgcgcgggaggggcctagggagcctcgggttgggacagcctgaggccttgtgcacggtggaggcaggacccagctgcccagggcaggtcctagggtctggatggggctgaaccccgtaaagcctgcgcttccggaagaagcttgcgctggaggcagggaagggtcccagccaggcccgagaggagcaggacgtggatacagtgagccagagtgtcagccggtcggaaagcccatgggggcagaacagcgggagatcagggcaggtggccgggccagggctgccacttggtctttactcagtggcagggcaggctccctgactgccacccaccgcctgaggagcctgagatgggtttcccatggcaagctgaattcctgccccactcgagattttatgaattactgaggattcttgccttcctaattttggttgtgtgtcccacagtcccggggatcaggaggggttaacagaagaccaagggtcaggttttctgcactgcggggagccaccccagatctgtagtccaggctcatgggcgggtgagggggtagcttccaagccccaaaggttagagagcaaaggtgtggccagttgtggagggagggggagcgtcgggttgtttgcagtgctggggagataagaatattcaggaatcagatggtggtgatggttgcacagctctgtgaatatactgcagcccactgagcactacactgtaaaggggtgactattatggtgtgaggattatatcccgatttttaaaagatgtgaaaaaattaatgtttatttatacgatatataagacattgatttttaaatacagcggtaccatccccgtcccccataaccctggttcctccaggcacttggagccattggtggaaggacgtggactcctagaaggtgattcgcaaaggtgccacgtaagcagaggagccgggtaagcagaggcccagtgccacgtaagcagaggaaggcccggagccggctgctgaggtcctgagggagagggaggggcacctgctcagccttgcctgtgtgtgtggatccttctctctcaggggaagctgcctggacatgcatgcgccttgcagttctgtcctgccaggctgcctgctcttcctcttgaaagcaaaagacttcacttgctgaggatgcaacgatgctctagtgtcccttgcaggagccagtgtcagagccaggagccgtcgtgggcatcccctgctccaaagttacgagttctggtgaaggggtcaggacagcccctttgagagttcagcagagcaggtctgcacaggtcccacaccgtgcacagcccacactccacctgccctggtgcacactgacggcagcagccagccgcggggaccccaggcgcagtgttgcctcgtgaacgttagagcagcctccagaggcgggtttggtctgcacacctggttcgcgggtgacacagttgtgacttggcccaggtcagttgttggggcctggccagctgtgggtggtgaggttttctcggacgcttcatctgctctcgttcttgttcgaattccttctgcctaagaatgacagctttaaaagtgaaatggcagcacgtctccatcattacacagaatcccatgtgggaagaccctagtcggaggcccccacccttgcccggaactggactttggggcagcagcaaactgcagtgagtgtgagtcacacctgaggacaggtgggctgtcttcaggctcccaacaggtctgtcgcttaaggggctggggaatgggggctggaatgccacggcctgcccacctgggggactctgggcagagctggagcagccaggcaggaaaatatcccccagtttccagagagtaaaagctgatggtcctgctgaggtgtgaaggacagtgacggacagtgatggaaggtgatggacagaggaggacagtgatggacagaggagggcagtgatggacagtgacgggcagtgatagacagcaacagagagtggaggacagtgatgaacagcaacagacagtggagggcagtgatggacagtggaggacagtggaggatagcagagggcagtgatggacagtaatggacagcaaaggacagtgagggacagcagaggacagtgatggacagcggaggacagtgatgggcagcggaggacagtgatggacagtggaggacagtgatggagagcagaggacagtgatggacaatggaggacagtggaggacagtgatggacagtggaggacagtgatggacagcggaggacagtgatggcgagcggaggacagtgatggagagcggaggacagtgatggacagcggaggacagtgatggcgagcggaggacagtgatggacagcggaggacagtgatggacagcggaggacagtgatggagaacggaggacagtgatggacagcggaggacagtgatggacagaggaggacagtgatggagagcggaggacagtgatggacagcggaggacagtgatggacagtggaggacagtgatggagaacggaggacagcgatggacagcggaggacagcgatggacagcggatgacagtggaggacagcggatgacagtggaggacagtggaggacagcgatggacagtggaggacagtgatggacagcggaggacagtgatggacagtaatggacagtgatggacagcggaggacagtgatggacagcggaggacagcggaggacagcgatggacagtggaggacagtgatggacagaggaggacagtgaaagacagagaaggacagcaatggaaggacagccaccccagtcagcacaaacgcaggccgagtggggcccatgcattcctgggaggactggcaagctgggaaaggcctccagggcagggaaactcaggagagtgacagcttgttcaggccaggaccttgtgcatcttctccttttttctttcttagtaaacccagtgtattcatttttagcggctgccataacaaattcccataaact

SEQ ID NO: 3925 - DNA, 3121 bp, Homo sapiens
gtcgctactgatcatgcttgggccagggtccaatcgcaggcgccccacgcagggggagcgaggcccagggtcccccggagagcccatggagaagtaccaggttttgtaccagctgaatcctggggccttgggggtgaacctggtggtggaggaaatggaaaccaaagtcaagcacgtgataaagcaggtggaatgcatggatgaccattacgccagtcaggccctggaggagctgatgccactgctgaagctgcggcacgcccacatctctgtgtaccaggagctgttcatcacgtggaatggggagatctcttctctgtacctctgcctggtgatggagttcaatgagctcagcttccaggaggtcattgaggataagaggaaggcaaagaaaatcattgactctgagatcaagacagaaggcgttcctaacactagaaggttcccagtcggtgaccatgattccagattgttctgccggtccctgaagttcctagacaaggttttgctatgttgcccgggctggtctcgaactcctgacctcaagtgatccacccgcctcggcctcccagagtgctgggattgcagatgtgagccgccgcgcctagccagttcactttcttaatgatgtcttttgatgatggaaagtcctaactgtaatggagttcgctttcccaatgctgactcttatggttagtgcctttggagtttaagaagcatttcctgctccaagatcatgaagatactctcctctgtcttatggaagcttggttatttttgccttcacatttagatctttcatctaccccagatgaatgctacctgcttttaccctgagaactgtgtttggggggaccatgtacccctgaggggctcttcggggcacacagctcttctcttaccatgggcctcagaggcaggcccggagtgagtttcagactttgtgagtgaagcccttcaaaacacgaaatattcccagaaacccagtaagtgcagcagacctactctaactgggggcagtgggaggacgcccacatcctgccccctcagcccctctctgacaccccagggtggccctgaatccaggggccctaggagcccagctttagaatcaccgcgctgggtactcgatggagcttgtctctgatgcagaacactcctagcattctctctcagggctcttttcatttgaatgacctagaggattgagctcatgtaggcactgaaggcttccacctctcccatacccgcaaggccgatctgccttcagctcccagcaagtgtggggcagcgcgggccacagagtagggtgcagggatggggcccctgcagcacccagggtctctggtatggagacagcagtgtggagtctggaaactcagagtccttctggctgccgccgcggctttaccatctggagagccaccacgctgaagcctcctccaccctgagcgcttggctggcttcaggcctgtctcaagatgcaaggagaggatacaccaccatcctgctggctgctctgagtgtcacccccctgaaagcagcacagggtgcccctcccatcctggcaccccctacttctcccccagtggatgcagaatgtgctgggccaggtgctggacgcgctggaatacctgcaccatttggacatcatccacagacccctttcgtaagtcctggatggcccctgaagccctcaacttctccttcagccagaaatcagacatctggtccctgggctgcatcattctggacatgaccagctgctccttcatggatggcacagaagccatgcatctgcggaagtccctccgccagagcccaggcagcctgaaggccgtcctgaagacaatggaggagaagcagatcccggatgtggaaaccttcaggaatcttctgcccttgatgctccagatcgacccctcggatcgaataacgataaagtctgccgtggcccccggagctggtggaggtggtggtcacgaccatggagctacatgacagggtcctcgatgtccagctgtgtgcctgctccctgctgctgcacctcctgggccaaggtatcattgtgaacaaggcccccttggagaaggtcccggacctcatcagccaggtgttggccacctaccctgcggatggggaaatggcagaagccagctgcggagtcttctggctgctgtccctgctgggctgcatcaaggagcagcagtttgaacaagtggtggcgctgctcctgcaaagcatccggctgtgccaggacagagccctgctggtgaacaatgcctaccggggactggccagcctggtgaaggtgtcagagctggcggccttcaaggtggtggtgcaggaggagggcggcagtggcctcagcctcatcaaggagacctaccagctccacagggacgacccggaggtggtggagaacgtgggcatgctgctggtccacctggcttcctatgaggagatcctgccggagctggtgtccagtagtatgaaggccctgctccaggagatcaaggagcgcttcacctccagcctggtgagtgacagcagcgccttcagcaaaccaggcctccctccaggtggaagcccccagctggggtgcaccacgtctgggggactggaatagatgtttgtatggaactgaccttgatctccacgtgtatagttttcaagactgctctcctgcctgcctattatcccatctctatgactgggccaaaatcaatcttaaacgggaggggtaatcagacctctccaaagagtttcctgtccatgactgctggattgagtcacatgagtaactgctcctggacccggggactgtccacgaaaactgacttgcctgcttcctccttccaggaactggtttcttgcgcggaaaaagtgctcttgaggctggaggcagccacctctcccagcccactgggtggggaagcagctcagccctgatgcgggggagaagacagataccccacaggcccctccctccacgtgtgccctctccctgtccttcctttccatgggccactgtttcccttggggtggggggaagggtcatccagcaccagaatgcgcatctcacactcctcttaggtgactaataaagaggcccaaggcc

SEQ ID NO: 3926 - DNA, 3257 bp, Homo sapiens
tgaggaggcccaggaatctgtacttttaataaggccctggagtctaagcagctgctgctgtccctctacactaagccgcttgccagtgtggagctcatgattggcctgtggtttcccagtgattcacccgggactgactctgcctctgtggatccggctataacagcatcgtcatccacacctgtgatccgctccagtgtcctccctcccaccctatcctctttgccttttcatcctgttgtccgctgttgtccctgggctctggtcttactgtcccatccccagactggtccttgtttgtttcctttatttaaggtgcactcttcatctttctcaggaaatatgggccagctattggctgagcatccttcgggggctaagcatgactatcctaattgcacagaggctttttctcatacattccttcctctccccaatttcttcccatattttgttccaaagtggccatatcagtttcttctgctgtttgcatatcttcctgaaatgttaaaacaaccgaacgacagcacagccctcatctctgtctagtattgcacaagaaagtgggctgttctctgtgttgtagcatctgttttcctcttgccaaatgagggcctggtaagaagacccaggatccagtcctgatgctgccaccaactcacagtgtgaccctgggcatgtcacagctgccccttggacttccagtgctgccctgagaagctgcattgagagcagttaggagcacagaatctgaaaccagcccacccaggcaaaattctagctagcaacttggcaagttacttaaactctgtctgccttagtagtctcatctatgaaatggagctaagaataataattcccctcttgaaattgagtgagttaagacatataacatttttagaagagtgcctggcacagaataatcagtgtcatttccctcccagtattaaaaaagagggttgctctaaattagcacttcctagaggatagtctatgagattctttcccacagggcactcagcaagagaaaaaggggaggagagagttctgggtacaggcttctggcagtgcagaaagctattaaaccttattttgtctaattccagtctctctcaaactcccttgaccatagaatccatttttcccagtacctcctagcatcctgtacttctcccatggaacacttctgagaaacacccctccagctttgacatgtatgggaaaaaaggcactggggttattgagcccttactgtgtgtcactttgtgtggatggctttgcagagttttcccccagctcccctcagaggaaactgaggccagagagaggccctggttaacaaatgtgttttgttccaaatcctggactcagactactgttatttactatctcctttggtcctaactgttgagagggggaggattggagacgactagaacatgcaaggcctgtggtttagggctgtcatctgcaagcagaagtttgtggctctggtttccaggaggctacaggacacccacatggcacagcttcctgacaaaatggcagctaatcaaatctgcctacctttccacccccacactgacgtttgcctccaccggaactccttttctatgcatttcatcttctcagatacagcggtgcttctgtttgatttctggagtgtccacagtcctgctggcatggccctttcggtgttggtgctcctgcttctggctgtactgtatgaaggcatcaaggttggcaaagccaagctgctcaaccaggtactggtgaacctgccaacctccatcagccagcagaccatcgcagagacagacggggactctgcaggctcagattcattccctgttggcagaacccaccacaggtggtatttgtgtcactttggccagtctctaatccatgtcatccaggtggtcatcggctacttcatcatgctggccgtaatgtcctacaacacctggattttccttggtgtggtcttgggctctgctgtgggctactacctagcttacccacttctcagcacagcttagctggtgaggaacgtgcaggcactgaggctggagggacatggagccccctcttccagacactatacttccaactgccctttcttctgatggctattcctccaccttattctcagcccctggaaactttgagctgaagccagcacttgctccctggagttcggaagccattgcagcaaccttccttctcagccagcctacatagggcccaggcatggtcttgtgtcttaagacagctgctgtgaccaaagggagaatggagataacaggggtggcagggttactgagcccatgataatgcttctctgtgactcaaaccaggaatttccaaagatttcaagccagggagaagggttcttggtgatgcagggcatggaacctggacaccctcagctctcctgctttgtgccttatctacaggagcatcgcccattggacttcctgacctcttctgtctttgagggacagagaccaagctagatcctttttctcacctttctgcctttggaacacatgaagatcatctcgtctatggatcatgttgacaaactaagttttttttatttttcccattgaactcctagttggcaattttgcacattcatacaaaaaaatttttaatgaaatgatttcattgattcatgatggatggcagaaactgctgagacctatttccctttcttggggagagaataagtgacagctgattaaaggcagagacacaggactgctttcaggctcctggtttattctctgattgatagactgagctccttccaccagaaggcactgcctgcaggaagaagatgatctgatggccgtgggtgtctgggaagctcttcgtggcctcaatgccctcctttatcctcatctttcttctatgcagaacaaaaagctgcatctaataatgttcaatacttaatattctctatttattacttactgcttactcgtaatgatctagtggggaaacatgattcattcacttaaaatactgattaagccatggcaggtactgactgaagatgcaatccaaccaaagccattacattttttgagttagatgggactctctggatagttgaacctcttcactttataaaaaaggaaagagagaaaatcactgctgtatactaaatacctcacagattagatgaaaagatggttgtaagctttgggaattaaaaacaaacaaatacattttagtaaatataaaaaaag

SEQ ID NO: 3927 - DNA, 3658 bp, Homo sapiens
ggaacagtgtggggcctggaccgctgggtaggcgcgtccagcggcctgagcaggggagggtaatgaggctgttacgcgccttctccgcatcttggcgggagcctgacgccccgcttcttccctaacggggtgttccaccggcgcctgccgaggcctaggcctccgcagccgccctccgtctcctcagccccgacgctgcgcccgctttgtgcgcatttttctctggggaaactgaggctccgagtgcgaaagtcagccgaggtcgccccgcccaggacagagaagggctgggggtcggctgagccgcggcattcccgggccccgctagggctgcagggtctcaggatggcagcctcggcgcaggtgtctgtgacctttgaggatgtggctgtgacattcacccaggaggagtggggacagttggatgcagcccagagaaccttgtatcaggaggtgatgctggagacctgcggacttctcatgtctctgggctgtcctttgttcaaaccagagctgatctaccagttggatcacagacaggagctatggatggctacaaaagacctctcccaaagctcctatccaggtgacaacacaaaacccaagaccacagagcctaccttttctcacctggccttgcctgaggaagtcttactccaggaacaactgacacaaggagcctcaaagaactcccaattagggcaatccaaggatcaggatgggccatctgaaatgcaagaagtccacttgaaaatagggataggcccccagcgggggaagctgctggagaaaatgagttctgaacgtgatggtttggggtcagatgatggtgtatgtacaaagattacacagaaacaagtttcaacagaaggtgatctctatgaatgtgattcacatggaccagttacagatgccttgattcgcgaagagaaaaattcctataaatgtgaggaatgcgggaaagtgtttaaaaagaatgccctccttgttcagcatgaacggattcacactcaagtgaagccctatgaatgcacagagtgtgggaaaacctttagcaagagcactcatcttcttcagcacctcatcatccacactggggagaagccctataagtgcatggagtgtgggaaggcttttaaccgcaggtcgcacctcacacggcaccagcggattcacagtggagagaagccttataagtgcagtgaatgtggaaaggccttcacccaccgctccacttttgtcttgcatcacaggagccacactggagaaaaaccctttgtgtgcaaagagtgtggcaaagcctttcgagataggccaggtttcattcgacactacatcatccacacgggagagaagccctatgagtgcattgagtgtgggaaggccttcaaccgccggtcatacctcacgtggcaccaacagattcacactggagtgaaaccctttgaatgcaacgagtgtggaaaagctttttgcgagagtgcagacctcattcaacactacattatccacactggggagaagccctataagtgcatggagtgtgggaaggcgttcaaccgtaggtcacacctcaagcagcatcaacggattcacactggggagaagccttatgaatgcagtgaatgtggaaaggccttcacccactgctccacttttgtcttgcataaaaggacccacacaggagaaaaaccctatgaatgcaaagaatgtggaaaagcctttagtgatagggcagacctcattcgccacctcagcatccacactggagagaaaccctatgagtgcgtggagtgtggaaaggccttcaaccgcagctcacacctcacgaggcaccaacagattcacactggagagaaaccctatgaatgcatccagtgtgggaaagccttttgccggagcgcaaaccttattcgacactccatcattcacactggagagaagccgtatgaatgcagtgagtgtggaaaggcttttaatcgcggctcatccctcacacatcatcaaaggattcatactgggagaaaccctaccattgtaacagatgtgggaagaccttttatgactgcacagacttcagtcaacatccaggaacttttattagggaaagagtttttgaatatcaccactgaagaaaatctgtggtgaaagggaacatcttaccatctggccattcacactgaagagaaacttcataagcatcctctctttgagaaaacgtgtaatagatgatcatttgtcgtctaaacaatcaagttagaaattgaaccagcctggagtcttattctccacctgagaattcacccatgagagagacccagtggttgctatgcacttaggaaaactttcagccacatctttcttcttagtttacagtgaaatattatctcagggatatttttttttttttttgagacggagtctcgctctgtcgcccaggctggagtgcagtggcgggatctcggctcactgcaagctccgcctcccgggttcacgccattctcctgcctcagcctcccgggtggctgggactacaggcacccgccactacgcctggctagttttttgtatttttagtagagacggggtttcaccgttttggccgggatggtctcgatctcctgacctcgtgatccgcccgcctcagcctcccaaagtgctgggattacaggcgtgagccaccgcgcccggccatctcagggatatttaaacaaaggaagaggaaatatagggaagagaaagaaaccacagcttcttttagacttgtctgacaagcctatggcaattttgtcgtccctttgttattttatgtgggagagggaaatgtttcagaaacgaaagatctcatcccctttatttttctgtgtatgcattcactgctgcccagtgtcagaacagttatacaaacgagggcttgaaaacattttgtgaaaacttgcttagtcctgcaacgttctccactctcgaggtgcaggagcatacatctttataaaaaatatggaggcttgagttatgaaacacttttataaggagataaggatgtacatatgtttggacacattgtccacttcagatgcttgtttaaaaaaatgtttcaccatgtgtctttacccaatacacatactttttcttgatgtggatttactttttttttttttttttaagtttttctgggatagggatgatagtgtaattgttcatgcccacagtaatcctgggaatcttagttttttcctatgattgtggtttctcagcttctttacctctcctttgagttaggtccacctcagttttctaaaggtcaaattaaggcccccccaaaaatacagtatgtagctgaattcctttgaaagatcatgataaactcagaagaacaaacatagaaggaatgtcatttttaatctttttaaagagtgtgtgaaaattcactttaactggaattttaacaggcaagccggcatgcatatatgtagggatgtgtgactttcacagttgtcaccatggacttaggcttgattaaaatgctacacatttagagcgttttgtaattccttttttatatttttaagactagattttgagccatgtgatagttttacctcatattaaatatattgtacagaagtaaaaataatcatgtattcactttgaactcctc

SEQ ID NO: 3928 - DNA, 2800 bp, Homo sapiens
gatcatgctcaggtggtccatggagttatttgcagcatttcttgctcctggaagtggggttgagggcccgaggagaagcagaggctgctcggcagagatcccggaacactttatccctctctcttgcccaggttttatgccgctgagataatgtgtggactgcagtttctacacagcaagggcatcatttacaggtgcgggggtgagggcagcgggggctcttgggaggggaggctccagccccatcatatcttctgaaatgctccaagcaggatccccccaactccagttccttctctgctggaaatcaatctttagctgggtatttgcctatgcctcccaccctggtgttagcattcctgtggccaccatttgaggctggctcagcttcaggaactaggaactcactgctcatatttgacaccatcgccccacccatccttggagccgtcagtctcgctctgaagccccatcgagtcatctaagcttctgccagaagggactccttccataaagtctcatctaataagttatgattccatcctatggtgggaactgtacacccaccaaaaaggctgaggtcaggctctgtatactgatgtgggataatgccaagatatgttgttaagtggaaaaacaacctgtgggaaagtgtatatcgaatattagcattcagcctttaaaacgtgggattataggcgtgagccatcgtgcctggcccgcatctataaattagatataactataatgtataatagggtcattgtgaagatcaaatggaataagatatgtaaagctgtattttaagtgccttccactggtagccgttctgtgtaagaagtctgttatcattattacacatgctttgtgtgtatgtacaggtgtctgttttgaggcgtgtccatgtgcatgtgtaagagagggcatttaggagccgtttgctatcccagggcttggaagaactgcccccgcttctcatattgcgatgccctgtgcccgctaacttctgcccacctccctgcccactaggactccttctttctaagcccctgcagattggcctgtcctctccgccccgtcctctccaggctcctccttcgagggctggcaggaggaagactcaagcgctgggcctctgcggggtgagggtgtgggcggtcaggagaacggtggctttgtgtagagggctagactggtcggcaggcaccagctcatagactctgcccctcccggtgctttcccttccccctcctgggcctgtgcctcttcaagaatgtaacgctgccatccacaagaaatgcatcgacaagatcatcggcagatgcactggcaccgcggccaacagccgggacgctatattccagaaagaacgcttcaacatcgacatgccgcaccgcttcaaggttcacaactacatgagccccaccttccgtgaagatgaaggaggcgctcagcacagagcgtgggaaaacactggtgcagaagaagccgaccatgtatcctgagtggaagtcgacgttcgatgcccacatctatgaggggcgcgtcatccagattgtgctaatgcgggcagcagaggagccagtgtctgaggtgaccgtgggtgtgtcggtgctggccgagcgctgcaagaagaacaatggcaaggctgagttctggctggacctgcagcctcaggccaaggtgttgatgtctgttcagtatttcctggaggacgtggattgcaaacagtctatgcgcagtgaggacgaggccaagttcccaacgatgaaccgccgcggagccatcaaacaggccaaaatccactacatcaagaaccatgagtttatcgccaccttctttgggcaacccaccttctgttctgtgtgcaaagactttgtctggggcctcaacaagcaaggctacaaatgcaggcgtaagtgtctccacaggccagtttgtacgtatgtacccatgtgtgctcacgtgtgccagtgcctgtgtgtatgccagtgcctgtgtgcgctcagagagtgtatgcacgtgagttttcccagtgtagctacagcagctgagttcagtgagtgctggggctggcttgctgctgctctggaaaaccagttctgcgcatctcttcccagctccgcattcagtgacggggagttggtggatggcaattgggcacagtagagtattcacgcagaaaccagcccaggccatgcaccaggcctcttttccccggagaggcaatgataggtcctttactggcacatagtggctgcatgtgcttctgtgtagatgtgggtgtctctgagtacacaggtgtgagcacactctgtccctgagggtgtatacacgaggcgccgcaggctggagccagactgcctgggtttgaatcccagctctaccacttcctagctatagggccttaggcaaagttacttaacctctctgtgcctcagtttcctcatctataatttttttttttttgagactgagtctcattctgttgcccaagctagagtgcagttgtgcgatctcagctcactgtaacctccctctccaaggttcaagcgattctcttgccttagcctcctgagtagctgggattacaggcgtgcaccagcctgaccaacatggtgaaaccctgtctctactaaaaaatacaaaagttagctgggcatggtggtggatgcctgtaatctcagctactcaggaggctgaggcaggagaattgcttgaacccgggaggcggaggttgcagtgagctgagatcatgccaccgcactccagcctgtgtgacagaatgagactgtgtctc

SEQ ID NO: 3929 - DNA, 5202 bp, Homo sapiens
gtctccaggactgacgctcaggctcctctctcgccttagcccaacttgctttcccgcctcgcaaactccggtttccctccactcccaactcttttcactacacgtttcccctcctctatctcccacgccacgaaccccgatccccagactcctctctcccgccctcctccttcctctctcctcccttcaactcttcatccgcttccacctcagactctgcgcgcacccaattcagtcgcccgctcccgttcggctcctcgaagccatggcgggacctgggggctggagggacagggaggtcacggatctgggccacctgccggatccaactggaatattctcactagataaaaccattggccttggtacttatggcagaatctatttgggacttcatgagaagactggtgcatttacagctgttaaagtgatgaacgctcgtaagacccctttacctgaaataggaaggcgagtgagagtgaataaatatcaaaaatctgttgggtggagatacagtgatgaggaagaggatctcaggactgaactcaaccttctgaggaagtactctttccacaaaaacattgtgtccttctatggagcatttttcaagctgagtccccctggtcagcggcaccaactttggatggtgatggagttatgtgcggcaggttcggtcactgatgtagtgagaatgaccagtaatcagagtttaaaagaagattggattgcttatatctgccgagaaatccttcagggcttagctcaccttcacgcacaccgagtaattcaccgggacatcaaaggtcagaatgtgctgctgactcataatgctgaagtaaaactggttgattttggagtgagtgcccaggtgagcagaactaatggaagaaggaatagtttcattgggacaccatactggatggcacctgaggtgattgactgtgatgaggacccaagacgctcctatgattacagaagtgatgtgtggtctgtgggaattactgccattgaaatggctgaaggagcccctcctctgtgtaaccttcaacccttggaagctctcttcgttattttgcgggaatctgctcccacagtcaaatccagcggatggtcccgtaagttccacaatttcatggaaaagtgtacgataaaaaatttcctgtttcgtcctacttctgcaaacatgcttcaacacccatttgttcgggatataaaaaatgaacgacatgttgttgagtcattaacaaggcatcttactggaatcattaaaaaaagacagaaaaaaggatttgcagtgagccaagatcatgccactgcactccagcccgggtgacagaacaagacgctgcctcaaaaaaaataaaaataaaagtaccaggatggattttcaccaagtccagaagaagcccctgggaagtcctaactttatatattatattacatattccacatttgattttgcggaccataggcagagttgagagtaacaatggaatgtaaaagggaaaacttgaaaaagcaggcatcctcagatcagctgtgggattgattgtagtggggcttgttgtatctatacatgtatcatgttttgaggcaaggagcagcaagaattaatttatttacctatggtaatgaagttattcagccaactttacagaggccagccagtttcaaatgggttcaggaaaaccacacatctatatggtaatttgctaatttccagaattgcaaaatttccaaaatgttacctgtaggaaaagttccatttatatggaagttacactaaagatataaatatagttgccctgaacattttaatataggaaattcaaaataaaactcttgtttgtaatcttctatatttcagtagtcacagtacagctgatgataggaaagaagctgaatgttttcaatgtgtttagtgtaaaacacagaattaagaatttgccttctcattgaaaagaccaaatatcaacctcaagccataaagtccttacatctagagcccacagctgtaagccatgctcaccactatttagagtttctcttgtctcattctccctttgtcccattctctcttcttcctctttagaattgcagaaatcaagttgctaaattttctctgttcagagaaattaatctgcatgcaatagctatattgtgctgcaaaagtgggcctagaaactagaatatggtctacatcacaaaccaagtacttttgaagggctaccttcttgcccttgtaattcactccacatcctaagaagcagagggaacaaggtgattaagtggataacatgcttatctgctgactgtttatgcattatgtttttctcttttgtaaaaaaaggaatacctttgatctttgaaagagaagaagctattaaggaacagtacaccgtgagaagattcagaggaccctcttgcactcacgagcttctgagattgccaaccagcagcagatgcagaccacttagagtcctgcatggggaaccctctcagccaaggtggctacctgatcgagaagagccacaggtccaggcacttcagcagctacagggagcagccagggtattcatgccactgcaggctctggacagtgcacctaagcctctaaaggggcaggctcaggcacctcaacgactacaaggggcagctcgggtgttcatgccactacaggctcaggtgaaggctaaggcctctaaacctctacaaatgcagattaaggcacctccacgactacggagggcagccagggtgctcatgccactacaggcacaggttagggcacccaggcttctgcaggtacagtcccaggtatccaaaaagcagcaggcccagacccagacatcagaaccacaagatttggaccaggtaccagaggaatttcagggtcaagatcaggtacccgaacaacaaaggcagggccaggcccctgaacaacagcagaggcacaaccaggtgcctgaacaagagctggagcagaaccaggcacctgaacagccagaggtacaggaacaggctgccgagcctgcacaggcagagactgaggcagaggaacctgagtcattacgagtaaatgcccaggtatttctgcccctgctatcacaagatcaccatgtgctgttgccactacatttggatactcaggtgctcattccagtagaggggcaaactgaaggatcacctcaggcacaggcttggacactagaacccccacaggcaattggctcagttcaagcactgatagagggactatcaagagacttgcttcgggcaccaaactcaaataactcaaagccacttggtccgttgcaaaccctgatggaaaatctgtcatcaaataggttttactcacaaccagaacaggcacgggagaaaaaatcaaaagtttctactctgaggcaagcactggcaaaaagactatcaccaaagaggttcagggcaaagtcatcatggagacctgaaaagcttgaactctcggatttagaagcccgcaggcaaaggcgccaacgcagatgggaagatatctttaatcagcatgaggaagaattgagacaagttgataaagacaaagaagatgaatcatcagacaatgatgaagtatttcattcgattcaggctgaagtccagatagagccattgaagccatacatttcaaatcctaaaaaaattgaggttcaagagagatctccttctgtgcctaacaaccaggatcatgcacatcatgtcaagttctcttcaagcgttcctcagcggtctcttttggaacaagctcagaagcccattgacatcagacaaaggagttcgcaaaatcgtcaaaattggctggcagcatcagaatcttcttctgaggaagaaagtcctgtgactggaaggaggtctcagtcatcaccaccttattctactattgatcagaagttgctggttgacatccatgttccagatggatttaaagtaggaaaaatatcaccccctgtatacttgacaaacgaatgggtaggctataatgcactctctgaaatcttccggaatgattggttaactccggcacctgtcattcagccacctgaagaggatggtgattatgttgaactctatgatgccagtgctgatactgatggtgatgatgatgatgagtctaatgatacttttgaagatacctatgatcatgccaatggcaatgatgacttggataaccaggttgatcaggctaatgatgtttgtaaagaccatgatgatgacaacaataagtttgttgatgatgtaaataataattattatgaggcgcctagttgtccaagggcaagctatggcagagatggaagctgcaagcaagatggttatgatggaagtcgtggaaaagaggaagcctacagaggctatggaagccatacagccaatagaagccatggaggaagtgcagccagtgaggacaatgcagccattggagatcaggaagaacatgcagccaatataggcagtgaaagaagaggcagtgagggtgatggaggtaagggagtcgttcgaaccagtgaagagagtggagcccttggactcaatggagaagaaaattgctcagagacagatggtccaggattgaagagacctgcgtctcaggactttgaatatctacaggaggagccaggtggtggaaatgaggcctcaaatgccattgactcaggtgctgcaccgtcagcacctgatcatgagagtgacaataaggacatatcagaatcatcaacacaatcagatttttctgccaatcactcatctccttccaaaggttctgggatgtctgctgatgctaactttgccagtgccatcttatacgctggattcgtagaagtacctgaggaatcacctaagcaaccctctgaagtcaatgttaacccactctatgtctctcctgcatgtaaaaaaccactaatccacatgtatgaaaaggagttcacttctgagatctgctgtggttctttgtggggagtcaatttgctgttgggaacccgatctaatctatatctgatggacagaagtggaaaggctgacattactaaacttataaggcgaagaccattccgccagattcaagtcttagagccactcaatttgctgattaccatctcaggtcataagaacagacttcgggtgtatcatctgacctggctgaggaacaagattttgaataatgatccagaaagt

SEQ ID NO: 3930 - DNA, 3312 bp, Homo sapiens
acaaagagttggcagatcacggatggagggcagcatctcccaacagcctgggcggccgctgagacccagagaacccaaggactcccctgggctcatccagcagcctctgcttcccaggagagaggtgctgaagtccacgaagagggtctcgctctgtcacacaggctggagtgcagtggtgtgatcttggctcatcgtaacctccacctcccgggttcaagtgattctcatgcctcagcctcccgagtagctgggattacaggtggtgacttccaagagtgactccgtcggaggaaaatgactccccagtcgctgctgcagacgacactgttcctgctgagtctgctcttcctggtccaaggtgcccacggcaggggccacagggaagactttcgcttctgcagccagcagttgcagagcctggagtcgaaactgacctctgtgagattcatgggggacatggtgtccttcgaggaggaccggatcaacgccacggtgtggaagctccagcccacagccggcctccaggacctgcacatccactcccggcaggaggaggagcagagcgagatcatggagtactcggtgctgctgcctcgaacactcttccagaggacgaaaggccggaggggggaggctgagaagagactcctcctggtggacttcagcagccaagccctgttccaggacaagaattccagccacgtcctgggtgagaaggtcttggggattgtggtacagaacaccaaagtagccaacctcacggagcccgtggtgctcaccttccagcaccagctacagccgaagaatgtgactctgcaatgtgtgttctgggttgaagaccccacattgagcagcccggggcattggagcagtgctgggtgtgagaccgtcaggagagaaacccaaacatcctgcttctgcaaccacttgacctactttgcagtgctgatggtctcctcggtggaggtggacgccgtgcacaagcactacctgagcctcctctcctacgtgggctgtgtcgtctctgccctggcctgccttgtcaccattgccgcctacctctgctccagggtgcccctgccgtgcaggaggaaacctcgggactacaccatcaaggtgcacatgaacctgctgctggccgtcttcctgctggacacgagcttcctgctcagcgagccggtggccctgacaggctctgaggctggctgccgagccagtgccatcttcctgcacttctccctgctcacctgcctttcctggatgggcctcgaggggtacaacctctaccgactcgtggtggaggtctttggcacctatgtccctggctacctactcaagctgagcgccatgggctggggcttccccatctttctggtgacgctggtggccctggtggatgtggacaactatggccccatcatcttggctgtgcataggactccagagggcgtcatctacccttccaggtgctggatccgggactccctggtcagctacatcaccaacctgggcctcttcagcctggtgtttctgttcaacatggccatgctagccaccatggtggtgcagatcctgcggctgcgcccccacacccaaaagtggtcacatgtgctgacactgctgggcctcagcctggtccttggcctgccctgggccttgatcttcttctcctttgcttctggcaccttccagcttgtcgtcctctaccttttcagcatcatcacctccttccaaggcttcctcatcttcatctggtactggtccatgcggctgcaggcccggggtggcccctcccctctgaagagcaactcagacagcgccaggctccccatcagctcgggcagcacctcgtccagccgcatctaggcctccagcccacctgcccatgtgatgaagcagagattcggcctcgtcgcacactgcctgtggcccccgagcccggcccagccccaggccagtcagccgcagactttggaaagcccaacgaccatggagagatgggccgttgccatggtggacggactcccgggctgggcttttgaattggccttggggactactcggctctcactcagctcccacgggactcagaagtgcgccgccatgctgcctagggtactgtccccacatctgtcccaacccagctggaggcctggtctctccttacaacccctgggcccagccctcattgctgggggccaggccttggatcttgagggtctggcacatccttaatcctgtgcccctgcctgggacagaaatgaggctccagttgctctgtctctcgtggtcaccctgagggcactctgcatcctctgtcattttaacctcaggtggcacccagggcgaatggggcccagggcagaccttcagggccagagccctggcggaggagaggccctttgccaggagcacagcagcagctcgcctacctctgagcccaggccccctccctccctcagccccccagtcctccctccatcttccctggggttctcctcctctcccagggcctccttgctccttcgttcacagctgggggtccccgattccaatgctgttttttggggagtggtttccaggagctgcctggtgtctgctgtaaatgtttgtctactgcacaagcctcggcctgcccctgagccaggctcggtaccgatgcgtgggctgggctaggtccctctgtccatctgggcctttgtatgagctgcattgcccttgctcaccctgaccaagcacacgcctcagaggggccctcagcctctcctgaagccctcttgtggcaagaactgtggaccatgccagtcccgtctggtttccatcccaccactccaaggactgagactgacctcctctggtgacactggcctagggcctgacactctcctaagaggttctctccaagcccccaaatagctccaggcgccctcggccgcccatcatggttaattctgtccaacaaacacacacgggtagattgctggcctgttgtaggtggtagggacacagatgaccgacctggtcactcctcctgccaacattcagtctggtatgtgaggcgtgcgtgaagcaagaactcctggagctacagggacagggagccatcattcctgcctgggaatcctggaagacttcctgcaggagtcagcgttcaatcttgaccttgaagatgggaaggatgttctttttacgtaccaattcttttgtcttttgatattaaaaagaagtacatgttcattgtagagaatttggaaactgtagaagagaatcaagaagaaaaataaaaatcggctgttgtaatcccctagc

SEQ ID NO: 3931 - DNA, 1864 bp, Homo sapiens
atcagaccaacgtgaattgaatcacagcagttcagaaagaggaaactggattcaggacttgaacgcaactcccaattgcagaaaattggcaacgtctctgaagagcccttgcttttgcctggacccccagcatcatggtttcccatttcatggggtctctcagtgtcctgtgtttccttctgctgcttggattccagttcgtctgcccacagccctccactcaacacaggaaggtcccgcagcggatggcggcggagggcgcccccgaggacgacggcggcggcggcgccccgggagtgtggggcgcctggggcccctggtcggcctgctcgcgtagctgcagcggcggcgtgatggagcagacgcggccctgcctgccccgctcctaccgcctgcgcggcggccagcggcctggcgcccctgcgcgcgccttcgcggaccacgcggtgtcggcggtgcgcacgtcggtgccactgcaccggagccgcgacgagacgccagcgctggccggtacggacgccagccgccagggccccacggtgctgcgaggcagccggcacccacagccccagggcctcgaagtcactggggacagaaggagcaggacccgtggtaccattggccctggcaagtatggctatggtaaggccccatatatcttaccactgcagacagacactgcacacacgccacagaggctccggagacagaagctctcatcccgccattccaggtcccagggagcatcttctgctaggcatggctacagttcaccagcccaccaggtcccccaacatgggcctttgtaccaaagtgacagtggccctcgctctggactgcaggctgcggaggcccccatctaccagctacctttgacccatgatcaaggctaccctgcagcttcaagtctctttcacagcccagaaacaagcaacaaccacggtgtggggacccatggggcaactcagagcttctctcagcctgcccgatctacagcaatctcatgcatcggggcctatcggcagtacaagctgtgcaacaccaacgtatgtccagaaagcagtagaagtatccgggaggtacagtgtgcatcctacaacaacaagccattcatgggccggttttatgagtgggaaccatttgcagaagtaaaaggcaatcgcaaatgtgagttgaactgccaggcaatgggctaccgcttctatgtacggcaagctgagaaagtcatcgatggcaccccctgtgaccagaacggcacggccatctgtgtgtctgggcagtgcaagagcattggctgtgatgactacttaggctccgacaaagtcgtggacaaatgtggggtgtgtggaggagacaacacgggctgtcaggttgtgtcgggcgtgtttaagcatgccctcaccagcctgggctaccaccgcgtcgtggagatttccgagggagccacgaaaatcaacatcacggagatgtacaagagcaacaactatttggccctgagaagtcgttctggacgctccatcatcaatgggaactgggcaattgatcgaccaggaaaatacgagggcggagggaccatgttcacctacaagcgtccaaatgagatttcgagcactgccggagagtcctttttggcggaaggtcccaccaacgagatcttggatgtctacatgatacaccagcagccaaacccaggcgtgcactacgagtacgtgatcatggggaccaacgccatcagcccccaggtgccaccccacaggagaccaggggaacccttcaatggccagatggtgacagaaggcaggagccaggaggagggagaacagaaagggaggaacgaggagaaggaagacttgcgtggggaggc

SEQ ID NO: 3932 - DNA, 3119 bp, Homo sapiens
acacctccccgcgccgccgccgccaccgcccgcactccgccgcctctgcccgcaaccgctgagccatccatgggggtcgcgggccgcaaccgtcccggggcggcctgggcggtgctgctgctgctgctgctgctgccgccactgctgctgctggcgggggccgtcccgccgggtcggggccgtgccgcggggccgcaggaggatgtagatgagtgtgcccaagggctagatgactgccatgccgacgccctgtgtcagaacacacccacctcctacaagtgctcctgcaagcctggctaccaaggggaaggcaggcagtgtgaggacatcgatgaatgtggaaatgagctcaatggaggctgtgtccatgactgtttgaatattccaggcaattatcgttgcacttgttttgatggcttcatgttggctcatgacggtcataattgtcttgatgtggacgagtgcctggagaacaatggcggctgccagcatacctgtgtcaacgtcatggggagctatgagtgctgctgcaaggaggggtttttcctgagtgacaatcagcacacctgcattcaccgctcggaagagggcctgagctgcatgaataaggatcacggctgtagtcacatctgcaaggaggccccaaggggcagcgtcgcctgtgagtgcaggcctggttttgagctggccaagaaccagagagactgcatcttgacctgtaaccatgggaacggtgggtgccagcactcctgtgacgatacagccgatggcccagagtgcagctgccatccacagtacaagatgcacacagatgggaggagctgccttgagcgagaggacactgtcctggaggtgacagagagcaacaccacatcagtggtggatggggataaacgggtgaaacggcagctgctcatggaaacgtgtgctgtcaacaatggaggctgtgaccgcacctgtaaggatacttcgacaggtgtccactgcagttgtcctgttggattcactctccagttggatgggaagacatgtaaagatattgatgagtgccagacccgcaatggaggttgtgatcatttctgcaaaaacatcgtgggcagttttgactgcggctgcaagaaaggatttaaattattaacagatgagaagtcttgccaagatgtggatgagtgctctttggataggacctgtgaccacagctgcatcaaccaccctggcacatttgcttgtgcttgcaaccgagggtacaccctgtatggcttcacccactgtggagacaccaatgagtgcagcatcaacaacggaggctgtcagcaggtctgtgtgaacacagtgggcagctatgaatgccagtgccaccctgggtacaagctccactggaataaaaaagactgtgtggcttcttgtgacctgagctgcatcgtaaagcgaaccgagaagcggctccgtaaagccatccgcacgctcagaaaggccgtccacagggagcagtttcacctccagctctcaggcatgaacctcgacgtggctaaaaagcctcccagaacatctgaacgccaggcagagtcctgtggagtgggccagggtcatgcagaaaaccaatgtgtcagttgcagggctgggacctattatgatggagcacgagaacgctgcattttatgtccaaatggaaccttccaaaatgaggaaggacaaatgacttgtgaaccatgcccaagaccaggaaattctggggccctgaagaccccagaagcttggaatatgtctgaatgtggaggtctgtgtcaacctggtgaatattctgcagatggctttgcaccttgccagctctgtgccctgggcacgttccagcctgaagctggtcgaacttcctgcttcccctgtggaggaggccttgccaccaaacatcagggagctacttcctttcaggactgtgaaaccagagttcaatgttcacctggacatttctacaacaccaccactcaccgatgtattcgttgcccagtgggaacataccagcctgaatttggaaaaaataattgtgtttcttgcccaggaaatactacgactgactttgatggctccacaaacataacccaattctgtgacaacatatgaaacctgccagacctacgaacgccccatcgccttcacctccaggtcaaagaagctgtggattcagttcaagtccaatgaagggaacagcgctagagggttccaggtcccatacgtgacatatgatgaggactaccaggaactcattgaagacatagttcgagatggcaggctctatgcatctgagaaccatcaggaaatacttaaggataagaaacttatcaaggctctgtttgatgtcctggcccatcctcagaactatttcaagtacacagcccaggagtcccgagagatgtttccaagatcgttcatccgattgctacgttccaaagtgtccaggtttttgagaccttacaaatgactcagcccacgtgccactcaatacaaatgttctgctatagggttggtgggacagagctgtcttccttctgcatgtcagcacagtcgggtattgctgcctcccgtatcagtgactcattagagttcaatttttatagataatacagatattttggtaaattgaacttggtttttctttcccagcatcgtggatgtagactgagaatggctttgagtggcatcagcttctcactgctgtgggcggatgtcttggatagatcacgggctggctgagctggactttggtcagcctaggtgagactcacctgtccttctggggtcttactcctcctcaaggagtctgtagtggaaaggaggccacagaataagctgcttattctgaaacttcagcttcctctagcccggccctctctaagggagccctctgcactcgtgtgcaggctctgaccaggcagaacaggcaagaggggagggaaggagacccctgcaggctccctccacccaccttgagacctgggaggactcagtttctccacagccttctccagcctgtgtgatacaagtttgatcccaggaacttgagttctaagcagtgctcgtgaaaaaaaaaagcagaaagaattagaaataaataaaaactaagc

SEQ ID NO: 3933 - DNA, 2356 bp, Homo sapiens
atataaaatgccgggttaagcggcaactcagactcaggatcccgctcacgacatggcctcgggcgctcagctcccgccgcagccgtcgagctcagaggtcagcgccgtccagagcccaggcgggcgtcccggcgccggtctggaggaaacagccctgggcgttcctctcccgccgtctccgggggaggcccctctgccccgaagcaaccggagcaggtgccctgggacccgccagcccggagcggcctccctccacgcggcgtccgcagcagtccccgtgcggccccggcgcggtacggcgccagccgggaaaaccgcagacgcggtccccgccgccgccccagagcaagctccgcggccggctccacagtcccgcaagccgcgcaacctggaaggcgacctggacgagcgccggctgctctgccacttgcagctggcccaggaccgcgaggcgcgcctgtggcggggcggcaaaccccaggatgaaatctgcgacgccttcgaggaagtcgtgctgtggctcctgcggcttcagaacaccttttacttctcccagtccacttttaacctggccctcaccatctttggccgcctcctgatttcagtgaaggtaaaagagaaatacctgcattgcgccacaattacttccttgaggctcgctgcaaaagttaatgaagaagaggagtttattccacaagtaaaagacttcacaaagcactatggctctgactattccccgaatgagctgctgaggatggagctggctattctggacagactgcactgggacctctatattgggacgccgctggacttcttgactatattccatgccctggtggtcctgagctggccccatgtgttggagctgctgcctcagaggaatccttccctccacgtcgcatccctgaccaggcagctgcagcactgtatggcgggccaccagctgctgcagttcaagggctccacactggccttggtcatcatcaccttagagctggagaggctcatgcccggctggtgtgctcctatatctgatctgctaaagaaagcacaggttggtgatatgcagtacagctgctgcaaggaacttgtaatgcagcaactgagaagtcttcagtcatcctcctgcacagacaactttgtgtcacctgccaactagcccctctgcctccaccccggggctttcagagcatagtgtgaaacctccttgcttggactaccatgagttctttggcttgttatgaatcctgtaaaaagggaaggtggctctggaagagcaactgagaaaaagttcccaactgagcccttggaaaaaaaataaaggggagaggggaaaggcaggctgaggtcagtagaggtcagggtggtctgatagactatgaccctgtcttccctttttctcctctgggcctgaagccagggagtatgaatgaatgttcaaatggcagcttgttttaccttccttctccagcaagggttggcattggcccctgggagcgctggaatatgaaaccaagaggcaggcctggctcagggctgaagggctggggctagctctgaccagttcttgctgctctacctgccagagctggccaggtccttccaacttcccaggcttatcccaaacacatatgtggtgcttccagtcccaactaccctgcctgccactcctcacatgggacagtctctgcagatgcatttacccaaccatggctatgacttatgtcttccctttacaaggactggattataaagtatgctttgtttaatgtaacttgagcaagctttagacatatctttcctttgttactcttaagcaaagtggtttcagttattagtttaactagagggattttgtgctaatgaatgggtattataggctaacacctgtgatgggaggcacagctctgaatgctttctgttgggatgagcaggttctgaggccaagcctgctccaaccacagtgctgccaggaggaggagccggctgcctctctcatgctgtgctaccacagagccattctctaagcaggggagtgcagctgacaaagatgccagctggggctgtgtaagttgtgttgggggcatgaatgactgagccacacattcagaggtggtttgtgaagtcttccactgtgaactatggttttttttttttttttttttttttggtgtgtttgtgtaaatgtgctaagccatggggtgggaggggaaagatttactaggtgcaaagtggtcaagggccagatatactataattgtctatattatagagttagtatacatctgtattttttcttgacacacttttgcttgttggtgctttcgttaaaattacactttaattgcttccg

SEQ ID NO: 3934 - DNA, 3411 bp, Homo sapiens
aagatacttagggaaagcgaagaagagcatgctgctacacaccactctggcttacgcttccagctaacagcggtttgtctgtgtttctggactgaagtgactgatgaaaaacagtagtcaagtctggagggtgattccctttcagttcacttgcctttcagttctggggaaattagaagatttgctctctctctctgcttcttagaatgggctgcaatttgtgcacttttcagaaaagagaggaacactacaaactgctgtatgaagtttcccaggagctgtgacttgaacaatgctattctgcatgaaattgagaaattgccagtgttcccaacctgatggagagtatgtgtgggatcttagttctgcttcattaagctccttgtgaatgagtggtaagagacaatttttccttaaacctttggcattgttgacatgttggccatccactgtcaatgggaaggatctttcaaaggccactcatgaagaggcagtggaagcttttcgcaatgccaaggagcccattgtggtgcaggtgttaaggcgaacacctcttagtagaccagcctatgggatggcttcagaagtgcagcttatgaatgccagcactcagacggacatcaccttcgaacacatcatggctctggccaagcttcgtccacctacccctccagtgccagacatctgtccattcctgctctcagacagctgccattctctacatccaatggagcatgaattttatgaggacaatgagtatatttccagcttgcctgctgatgcagacagaacagaagactttgaatatgaggaggtcgagttgtgtcgtgttagcagtcaagagaagctgggcctgacagtctgttaccgaacagatgatgaagaagacaccggcatttatgtcagcgaggttgacccaaatagcattgctgccaaagacggccggattcgagaaggggatcggattttgcaaataaatggggaagatgtccagaatcgagaagaagcagtggccttgctgtctaacgatgagtgtaagagaatcgtgctgcttgttgcaaggccagagattcagctggatgaaggctggctggaagatgaaaggaatgaattcttagaggagttaaacttggagatgttggaagaagagcataatgaagcaatgcagcccactgccaatgaggtggagcagccaaaaaagcaagaagaagaagaaggcacaacagacactgcaacatcctcatccaacaaccatgagaaggacagtggagtaggacgtacagatgaaagcttgcgaaatgatgagagctcagagcaggagaatgcagccgaggaccccaatagcacatctttgaagagcaagagagacctggggcagagccaagacactctgggaagtgttgaacttcagtacaatgagagcctcgtatctggtgaatacattgactcagactgcattggcaacccagatgaggactgtgaaagattcaggcagctcttggagctcaaatgcaagattcgaaatcatggagagtatgacctgtattactcaagcggcacaattgaatgcaatcaaggggagcaagagggagtggagcatgagctacagttgcttaatgaagaactgagaaacattgagcttgagtgtcagaatatcatgcaggctcacaggctccagaaagtgacagaccagtatggagacatctggacattgcatgatggaggattccggaattataacaccagcatagatatgcaaaggggaaagctagatgacatcatggagcatccagaaaagtctgacaaggacagttctagtgcttacaacacagctgagagctgcagaagtactccgctcactgtagaccgttcccctgacagttcccttccaagggtgatcaacctcaccaataagaaaaacctgagaagcacaatggcagccacccagtcctcttccggacagagcagtaaagagtcgacctccaccaaagccaaaaccactgagcaaggttgtagcgctgaaagcaaggagaaggttttagaaggcagcaagcttcctgatcaagagaaggcagtcagcgaacacatcccttacctctctccttaccacagctcctcatatagatatgcaaacatcccagcacacgcccggcattatcaaagctacatgcagttaattcaacagaaatctgcagtcgagtatgctcagagtcagctcagcttggtgagcatgtgcaaggagtctcagaagtgttcagagcccaagatggaatggaaggtgaaaattaggagcgacgggacacggtacatcacaaagagacccgtgcgagaccggatcctgaaggaacgtgccttaaagatcaaggaagagcggagtggcatgaccacagacgatgacaccatgagcgagatgaaaatggggcgctactggagcaaagaggagagaaagcagcacctggttagggccaaagagcagcgccgtcgccgtgagttcatgatgcgaagcaggttagagtgtctcaaggagagccctcagagcggcagtgagggcaagaaggagatcaatatcattgaactgagtcacaaaaagatgatgaaaaagagaaacaagaaaattttggacaactggatgacaatccaagaactgatgacccatggggccaagtctccagatggcacgagagtccataatgccttcttgtcggtgaccactgtatgaccgaatgaatggaatgcatgcgactgattttaggaggatgctaccagtttcggtagagtatgattgcctcgttcaatgtggcgtttttatatatattttgtgactctttatagtttaaattttttgtaagcaaaaaatacctggtaatttttcatttgtttttcatatactggtaccttctttttggctgagatctttcttttacttgtgatatattcatattactcgtttataaaaaatcaaaaacaaaaggaaagaaaacaaaaaaaacttgcacaaaaatactgaggagccaattaatttcctacttcaatgtatctaatgtaagtgaaaatctggatttatttctctagtttacttattttctactttaataataactcaatgccaaaatatttctatgcttgtttcttggcataatacattttaaatcaaacctgttcgtaataaatcatgtgccacatcttgtcttacacataaaagccactgcttttaacatcccattgtacatttaacacataaatggtgttaacatcccattgtacatttaacacataaatggccattgtctttgtctcagtaaagtgtaagtggacaatcttcctgtgatatgtagtgacattggtcatgtagctagataattatggtaattgtgacaattaaagagaaataaattattgattatccttcag

SEQ ID NO: 3935 - DNA, 2078 bp, Homo sapiens
actatattgaatagaagcgaagagacagagtatacttgtcttgttcctaatccagaagaaaagtttgaatcttttaccattgagtaagcttgagtgcccaagggtttgataaatgtggaaaataaccgctgttcgaatatcctgttggcctgctgaagaaatgactggctgaggctgtagagaaatcttgtggtcattctcatggaaagaggattggagccccgattctttgatctcattattgaccagttgattgagaagactgtcctcctgtccccacccaatcacaataagtggctctgaaatcacatgaagctgtggatggagagtcacctgatagtcccagaaacccgtcccagcccaaggatgatgagtaaccagacgttggtaaccgagttcatcctgcagggcttttcggagcacccagaataccgggtgttcttattcagctgtttcctcttcctctactctggggccctcacaggtaatgtcctcatcaccttggccatcacgttcaaccctgggctccacgctcctatgtactttttcttactcaacttggctactatggacattatctgcacctcttccatcatgcccaaggcgctggccagtctggtgtcggaagagagctccatctcctacgggggctgcatggcccagctctatttcctcacgtgggctgcatcctcagagctgctgctcctcacggtcatggcctatgaccggtacgcagccatctgccacccgctgcattacagcagcatgatgagcaaggtgttctgcagcgggctggccacagccgtgtggctgctctgcgccgtcaacacggccatccacacggggctgatgctgcgcttggatttctgtggccccaatgtcattatccatttcttctgcggggtccctcccctgctgcttctctcctgcagctccacctacgtcaacggtgtcatgattgtcctggcggatgctttctacggcatagtgaacttcctgatgaccatcgcgtcctatggcttcatcgtctccagcatcctgaaggtgaagactgcctgggggaggcagaaagccttctccacctgctcttcccacctcaccgtggtgtgcatgtattacaccgctgtcttctacgcctacataagcccggtctctggctacagcgcagggaagagcaagttggctggcctgctgtacactgtgctgagtcctaccctcaaccccctcatctatactttgagaaacaaggaggtcaaagcagccctcaggaagcttttccctttcttcagaaattaacttgtgtcttctgaagtttttgtccttggagactgcagttttagtggagtctgatgagcaagtttctggactgggaggtaaatagacttgttttttctaacccagcagaacctgtgcatggatgagctgggagtgctggttccctgagacttggtgatggggggattgcggtaggtgtgacccaccagcctctgagacaccagatctcttggtctgactccaaggtggtgtcagtgctgagttggcagagaaacacagggcctaggaggagaaaagtgttccttgtgttttcaactcatagccacatcaaacattttccttttgtatgtacaacactcagggtgtaaattctaaaatcacacctagaattcagctgtgtgggtctaaaaagttaggcagaattgtggaccccacagcccctgaagggttgtcagactgaagctttgttttaaggtgaccactggcctctaggaaaccttctacccccattatcttacctcaactgtttcctctggagccacttggacttcaaaaatagtttgattttaatgcaaactgttgtttctgcttttgtcttttcttcttactaacacttcagatcctgagtatctgacctacctaattggcctggagcgaggacagctgccatgagtcagctctaataagctaaacggcattgtagtaaggcattgctatccttccattgtttcagataaaactgggtgaacgaatcctctgtgtctaataaagacaggtcttgtgcttgtgctccatgctattac

SEQ ID NO: 3936 - DNA, 723 bp, Homo sapiens
agaccagaccaacagtaacaccaagggcaggtgggcaggcctccgccctcctcccctactccagggcccactgcagcctcagcccaggagccaccagatctcccaacaccatggtccgataccgcgtgaggagcctgagcgaacgctcgcacgaggtgtacaggcagcagttgcatgggcaagagcaaggacaccacggccaagaggagcaagggctgagcccggagcacgtcgaggtctacgagaggacccatggccagtctcactataggcgcagacactgctctcgaaggaggctgcaccggatccacaggcggcagcatcgctcctgcagaaggcgcaaaagacgctcctgcaggcaccggaggaggcatcgcagagagtccctaggtgaccccctcaaccagaactttctttcccaaaaggctgcagaaccaggaagagaacatgcagaaggcactaagcttcctgggcccctcacccccagctggaaattaagaaaaagtcgcccgaaacaccaagtgaggccatagcaattcccctacatcaaatgctcaagcccccagctggaagttaagagaaagtcacctgcccaagaaacaccgagtgaggccatagcaactcccctacatcaaatgctcaagccctgagttgccgccgagaagcccacaagatctgagtgaaatgagcaaaagtcacctgcccaataaagcttgacaagac

SEQ ID NO: 3937 - DNA, 4352 bp, Homo sapiens
gatctgcgcatgcgcactcgaggcaaggcggccactcccagaagtctccggggctcgagcggtgggtgggaggcgcggtccaagtggtcgctgccgtatttctcgtaggtttttaggattctggactccatttctcaccggtacctgcggtcctgactgttctggcttggactacatattccaaaggcaacggagaaaacttggacccctggctccggttccgggaccttttggttccacatgaagaaggcggcgcaggtcactgcgggagcctctgcagccccagcccgccgcccgcgtggtaccctgcgtggcggtgagagtggggctgcaggaggcgctcagagcgcggaggcccccaggcgggccgggcgagtctcccgcctccccaggccctagggtgctggagctgcggaggaggggcccgtctctaggagacaggcggggagcgtgagagaccgcgcagcggcgacaggaccggcttgcctgtgtgacgtgggtgcagttgcgggactgtgaggggtcttggttcttttgactttgctcttctggtagagaaacgccaaggactgatcaactcttgccagtctcaaaccatggcctatggatcaataacattcggggatgtggccatagacttctctcatcaggagtgggaatatctcagcctggttcagaagaccttgtaccaggaggtgatgatggagaactatgacaacttagtctcattggcaggacattccgtatctaagccagatttaatcaccttattggagcaaggaaaagagccatggatgattgtgagggaagaaacaagaggagagtgtacagatttggattcaagatgtgaaataatcagcgatgggaaaatgcagctttataggaaacactcatgtgttactctccatcagagaattcataatggacagaaaccatatgagtgtaagcaatgtcagaagtcctttagtcatcttacagaactcatggtacatcaaacaattcatactagtgaggaacctgatcaatgtgaaaagtttaggaaggcatttagccatcttacagaccttagaaagcatcagaaaattaatgctcgtgagaaaccttatgaatgtgaagaatgtgggaaggtcttcagttatcctgcaaaccttgctcaacatgggaaagttcatgttgagaaaccctatgaatgtaaagagtgtggggaagcttttaggactagccgtcaacttactgtacatcatagatttcattatggtgagaaaccctacgaatgtaaggaatgtggcaaggcctttagtgtgtatggacgacttagtcgacatcagagtattcacactggtgagaagccctttgaatgtaacaaatgtgggaagtcctttaggctcaaagcaggccttaaagtacatcagagtattcatactggagagaagccacatgaatgtaaggaatgtggaaaggcctttcgtcagttttcccaccttgtgggtcataaaagaattcatactggagaaaaaccctatgaatgcaaggaatgcgggaagggctttacatgtaggtatcaacttaccatgcatcagagaatttattcaggggagaaacactatgaatgtaaagaaaatggggaggcttttagtagtggccatcaacttactgcacctcatacatttgaaagtgttgagaaaccttataagtgtgaggaatgtgggaaagcctttagtgtgcatggacgacttactcgacatcagggtattcatagtggtaagaaaccctatgaatgtaacaaatgtgggaagtcctttaggctcaattcatcccttaaaatacatcaaaatattcataccggtgagaaaccctacaaatgtaaggaatgtgggaaggccttcagtcagcgtgcacaccttgcccatcataacagaattcatactggttacaaaccctttgaatgtaaagaatgtgggaagtcctttcgttgtgcctcatatcttgttatacatgagagaattcatacgggagagaaaccctatgtatgtcaagagtgtgggaagggttttagttatagccataaactcactatacatcgcagagttcatactggtgagaaaccttatgaatgtaaggaatgtgggaaggcctttagtgtatctggacaacttactcagcatctgagtattcacagtggtaagagaccctttgaatgcaacaaatgcgggaagtcttttaggttcatttctgtacttaaagcccatcagaatattcatagcgctgagaaaccctacgaatgtaaggaatgtggcaaggcctttcgtcatgccacaagcctcatatatcatgaccgaactcatgctggtgaaaagtcctatgaatgtaaagaatgtggggaaacttttagtcatgcttcacatcttattattcatgagagaattcataccagtgataaaccctatgaatgtaaaagatgtgggaaggcatttcactgtgcctcatatcttgttagacatgaaagcgttcatgctgatggaaatccctatatgtgtgaagagtgtgggaaagcttttaatagtagccatgaacttagtatacatcatagagttcatactggtgagaaaccctttaaatgtaacaaatgcagaaggtcctttaggcttagatccatccttgaagtacatcagagaattcatatttgatagagaaattgtggcatatacaggtagtaaagaaagcacattgtgtcaatggatttatcccactgaacaatttgaatgaagacaatgtggaatggctttgagatacagttcagtttttattaggcatcaatttgtattggtgtgaacttttcaaaatgtaaatcatatatgcagtttctttggtatgacctgtgttaactcagattcagagaatttataatgtatttttttaataacataagaaaacttttctgatattcctctagttttggattgccaaaatattcatagtagaggaaaactgagaaaacgtaggaaaccattctttatacttgcatgtaaacatcttccagcaacaatcatttattgttaaacctggaaaaagccattacacaggaaacctctgttgatataagcgatgatgggaaaggctatttagccactctgcatatttaatgctcatgatcaacatctgcttcctatagctgggatgatatgggggaagatatttatcccttctggggatcatatataaatgatgatagtagtacctacagtatagtgctgttagaattacatgagttagatgtggaggtcagagtggaagcaggtgtgagagggtcccgcagaagaaaacatggctgccaaagtgtttgagtccatcggcaagtttggcctggccttagctgttgcaggaggcatggtgaactctgccttatgtaatgtggatgctgggcacagagctgccatctttgaccaattccgtggagtacagaacattgtggtaggggaagggactcactttctcatcccatgtgtacaaaaaccaattatctttgactgctgttctcaaccacgtagtgcgccagtcatcactggtagcaaagatttacagaatgtcaacatcacactgtgcatcctcttccggcccatcactagccagcttcctcgcatcttcaccagcattggagaggactacgatgagtgtgtgctgccgttcattaccacggagatcctcaagtcactggtggctcgctttgatgctggagaactaatcacccagagggagctggtctccagccaggtgagcaacaaccttatggagtgagcagccacctttgggctcattctggacgacgtgtctttgacacatctgaccttcttgaaggagttaacagacaggtggccccccaggaagcagagagcgccagatttgtggtggaaaaggcggccatcatctctgctgagggtgactccaaggcagctgagctgatcgccaactcactggccactgcaggggacggccagagcgagctgtgcaagctggaagctgcagaagacattgcataccagctctcatgctctcggaacatcacctgcctgccggcagggcagtccgtgctcctccagctgccctagtgaggccccagcctacctgcacctccgtgaggcaactgggccacagccccgatgattcgtaacaccacctttcgccctcaccccagaaatcactgaaatttcatgattggcttaaagtgaaggaagtaaaggtaaaatcacttcagatctctaaaaaacaaagaattacatgagttagtacatgaaaaaattatgggaagctacatgaaatatactgttacgttcaataaacattagcttctgtat

SEQ ID NO: 3938 - DNA, 3370 bp, Homo sapiens
cttctggaaccgagctgtggcctggggttccatggagcaggtggggcgcggaggaactgagctgtggcctggggttccgtggagcaggttgagtatggaggaactggggttccgtggagcaggtggggcgcagaggaaccgagctgtggaatggggttccgtggagcaggttgagtgtgccggtcgtggacgggtcgtgggcgggactccccagtgtgtcaccactgaggcatcttcgccctcttacgtgtctctgtttctctctctagaagtccaacacctccgagaggactcaaaacacagagtgaccagctcctatgtgcatttcctgggcgacagcgagactccatctcaataaataaaaaaaaaaaagagttgttatcagtagaagggaatgtctggttacagtatggcgttgtgcagatgaaggtcttatcgcagatgaagccaccaggtcacaagcctcagagagaatcaactataaatgcttctcatcagactcaaggcctgaggtgatgctgatgctgtgcctgaattccagcagggaggaggcatgagggcagtgctgtcacagaagacaacaccgctccctcgttacctgtggcccggccacctcagcggcccaaggaggctcacctggtcatggtgcagtgaccacaggacccccacatgccgggagctgggttcgccccaccccaccccctgcaccgggccagcgaggggatggcccagaagagggggaggaccatgtggattcaccagtgctggacatgtgctctgtggctaccccctctgcctactctctggcccgatacaggggtgtgggacaggcctgggtgactccagcatggctttcctctccaggacgtcaccggtggcagctgcttccttccagagccggcaggaggccagaggctccatcctgcttcagagctgccagctgcccccgcaatggctgagcaccgaagcatggacgggagaatggaagcagccacacgggggggctctcacctccagatcgcctgggcctgtggctccccagaggccctgccacctgaagggatggcagcacagacccactcagcacaacgctgcctgcaaacagggccaggctgcagcccagacgccccccaacacgggccaccatcagcaccaccaccaccacccaaggaggggcaccaggaggggctggtggagctgcccgcctcgttccgggagctgctcaccttcttctgcaccaatgccaccatccacggcgccatccgcctggtctgctcccgcgggaaccgcctcaagacgacgtcctgggggctgctgtccctgggagccctggtcgcgctctgctggcagctggggctcctctttgagcgtcactggcaccgcccggtcctcatggccgtctctgtgcactcggagcgcaagctgctcccgctggtcaccctgtgtgacgggaacccacgtcggccgagtccggtcctccgccatctggagctgctggacgagtttgccagggagaacattgactccctgtacaacgtcaacctcagcaaaggcagagccgccctctccgccactgtcccccgccacgagccccccttccacctggaccgggagatccgtctgcagaggctgagccactcgggcagccgggtcagagtggggttcagactgtgcaacagcacgggcggcgactgcttttaccgaggctacacgtcaggcgtggcggctgtccaggactggtaccacttccactatgtggatatcctggccctgctgcccgcggcatgggaggacagccacgggagccaggacggccacttcgtcctctcctgcagttacgatggcctggactgccaggcccgacagttccggaccttccaccaccccacctacggcagctgctacacggtcgatggcgtctggacagctcagcgccccggcatcacccacggagtcggcctggtcctcagggttgagcagcagcctcacctccctctgctgtccacgctggccggcatcagggtcatggttcacggccgtaaccacacgcccttcctggggcaccacagcttcagcgtccggccagggacggaggccaccatcagcatccgagaggacgaggtgcaccggctcgggagcccctacggccactgcaccgccggcggggaaggcgtggaggtggagctgctacacaacacctcctacaccaggcaggcctgcctggtgtcctgcttccagcagctgatggtggagacctgctcctgtggctactacctccaccctctgccggcgggggctgagtactgcagctctgcccggcaccctgcctggggacactgcttctaccgcctctaccaggacctggagacccaccggctcccctgtacctcccgctgccccaggccctgcagggagtctgcattcaagctctccactgggacctccaggtggccttccgccaagtcagctggatggactctggccacgctaggtgaacaggggctgccgcatcagagccacagacagaggagcagcctggccaaaatcaacatcgtctaccaggagctcaactaccgctcagtggaggaggcgcccgtgtactcggtgccgcagctgctctcggccatgggcagcctctgcagcctgtggtttggggcctccgtcctctccctcctggagctcctggagctgctgctcgatgcttctgccctcaccctggtgctaggcggccgccggctccgcagggcgtggttctcctggcccagagccagccctgcctcaggggcgtccagcatcaagccagaggccagtcagatgcccccgcctgcaggcggcacgtcagatgacccggagcccagcgggcctcatctcccacgggtgatgcttccaggggttctggcgggagtctcagccgaagagggccgggctgggccccagccccttgagactctggacacctgaaccagacctgccagggctgtgcgatctcttggcctggtccttgcagctgtggcagcagcaggctccccagcggcccagggtgggccagaccagcagcccaggaagcagcacacgcggccgtggggaggcaggcaccgggcatgtcggcgcctctggtcaaaccacctacactgcctggggtgggtctcaaggaggcccggggcggaggggggttcccgcgtgcacacgagtgcggctggacgtgccgacacgcggtgatgtacccatgctccgtgtgtctgtgtctgcatgtccacacgtctgatgcacctgtgtacgtgtgtcaagcctagccacctcagctgcagggaggcagaaggcaaggcaggccccacggacacacttgggctgctctgaaataaagctgttg

SEQ ID NO: 3939 - DNA, 4003 bp, Homo sapiens
attgacccttggctccaggttccctgctgcttcctgtgccttcctcagcctagtacgactacaacagagaaatggtcccagtgggaaatcagatactgagtcttagatgaagatttccagtgagaagaaacagataggatgagaagcttagaagagtaattgcccttaagaaaggtcttggttcttttgactttgctcttctggtagagaaacgccaaggactgatcaactcttgccagtctcaaaccatggcctatggatcaataacattcggggatgtggccatagacttctctcatcaggagtgggaatatctcagcctggttcagaagaccttgtaccaggaggtgatgatggagaactatgacaacttagtctcattgggacattccgtatctaagccagatttaatcaccttattggagcaaggaaaagagccatggatgattgtgagggaagaaacaagaggagagtgtacagatttggattcaagatgtgaaataatcagcgatgggaaaatgcagctttataggaaacactcatgtgttactctccatcagagaattcataatggacagaaaccatatgagtgtaagcaatgtcagaagtcctttagtcatcttacagaactcatggtacatcaaacaattcatactagtgaggaacctgatcaatgtgaaaagtttaggaaggcatttagccatcttacagaccttagaaagcatcagaaaattaatgctcgtgagaaaccttatgaatgtgaagaatgtgggaaggtcttcagttatcctgcaaaccttgctcaacatgggaaagttcatgttgagaaaccctatgaatgtaaagagtgtggggaagcttttaggactagccgtcaacttactgtacatcatagatttcattatggtgagaaaccctacgaatgtaaggaatgtggcaaggcctttagtgtgtatggacgacttagtcgacatcagagtattcacactggtgagaagccctttgaatgtaacaaatgtgggaagtcctttaggctcaaagcaggccttaaagtacatcagagtattcatactggagagaagccacatgaatgtaaggaatgtggaaaggcctttcgtcagttttcccaccttgtgggtcataaaagaattcatactggagaaaaaccctatgaatgcaaggaatgcgggaagggctttacatgtaggtatcaacttaccatgcatcagagaatttattcaggggagaaacactatgaatgtaaagaaaatggggaggcttttagtagtggccatcaacttactgcacctcatacatttgaaagtgttgagaaaccttataagtgtgaggaatgtgggaaagcctttagtgtgcatggacgacttactcgacatcagggtattcatagtggtaagaaaccctatgaatgtaacaaatgtgggaagtcctttaggctcaattcatcccttaaaatacatcaaaatattcataccggtgagaaaccctacaaatgtaaggaatgtgggaaggccttcagtcagcgtgcacaccttgcccatcataacagaattcatactggttacaaaccctttgaatgtaaagaatgtgggaagtcctttcgttgtgcctcatatcttgttatacatgagagaattcatacgggagagaaaccctatgtatgtcaagagtgtgggaagggttttagttatagccataaactcactatacatcgcagagttcatactggtgagaaaccttatgaatgtaaggaatgtgggaaggcctttagtgtatctggacaacttactcagcatctgagtattcacagtggtaagagaccctttgaatgcaacaaatgcgggaagtcttttaggttcatttctgtacttaaagcccatcagaatattcatagcgctgagaaaccctacgaatgtaaggaatgtggcaaggcctttcgtcatgccacaagcctcatatatcatgaccgaactcatgctggtgaaaagtcctatgaatgtaaagaatgtggggaaacttttagtcatgcttcacatcttattattcatgagagaattcataccagtgataaaccctatgaatgtaaaagatgtgggaaggcatttcactgtgcctcatatcttgttagacatgaaagcgttcatgctgatggaaatccctatatgtgtgaagagtgtgggaaagcttttaatagtagccatgaacttagtatacatcatagagttcatactggtgagaaaccctttaaatgtaacaaatgcagaaggtcctttaggcttagatccatccttgaagtacatcagagaattcatatttgatagagaaattgtggcatatacaggtagtaaagaaagcacattgtgtcaatggatttatcccactgaacaatttgaatgaagacaatgtggaatggctttgagatacagttcagtttttattaggcatcaatttgtattggtgtgaacttttcaaaatgtaaatcatatatgcagtttctttggtatgacctgtgttaactcagattcagagaatttataatgtatttttttaataacataagaaaacttttctgatattcctctagttttggattgccaaaatattcatagtagaggaaaactgagaaaacgtaggaaaccattctttatacttgcatgtaaacatcttccagcaacaatcatttattgttaaacctggaaaaagccattacacaggaaacctctgttgatataagcgatgatgggaaaggctatttagccactctgcatatttaatgctcatgatcaacatctgcttcctatagctgggatgatatgggggaagatatttatcccttctggggatcatatataaatgatgatagtagtacctacagtatagtgctgttagaattacatgagttagatgtggaggtcagagtggaagcaggtgtgagagggtcccgcagaagaaaacatggctgccaaagtgtttgagtccatcggcaagtttggcctggccttagctgttgcaggaggcatggtgacctctgccttatgtaatgtggatgctgggcacagagctgccatctttgaccaattccgtggagtacagaacattgtggtaggggaagggactcactttctcatcccatgtgtacaaaaaccaattatctttgactgctgttctcaaccacgtagtgcgccagtcatcactggtagcaaagatttacagaatgtcaacatcacactgtgcatcctcttccggcccatcactagccagcttcctcgcatcttcaccagcattggagaggactacgatgagtgtgtgctgccgttcattaccacggagatcctcaagtcactggtggctcgctttgatgctggagaactaatcacccagagggagctggtctccagccaggtgagcaacaaccttatggagtgagcagccacctttgggctcattctggacgacgtgtctttgacacatctgaccttcttgaaggagttaacagacaggtggccccccaggaagcagagagcgccagatttgtggtggaaaaggcggccatcatctctgctgagggtgactccaaggcagctgagctgatcgccaactcactggccactgcaggggacggccagagcgagctgtgcaagctggaagctgcagaagacattgcataccagctctcatgctctcggaacatcacctgcctgccggcagggcagtccgtgctcctccagctgccctagtgaggccccagcctacctgcacctccgtgaggcaactgggccacagccccgatgattcgtaacaccacctttcgccctcaccccagaaatcactgaaatttcatgattggcttaaagtgaaggaagtaaaggtaaaatcactttagatctctaaaaaacaaagaattacatgagttagtacatgaaaaaattatgggaaactacatgaaatatactgttacgttcaataaacattagcttctgtatat

SEQ ID NO: 3940 - DNA, 4199 bp, Homo sapiens
ccttgagtcagccatggggtcagccacacagtcaccgcagctgctctttggcaccgggcgctggaaagagcctaggatgacacagcctggaaagagcttgggagaagctcatcttccacagaactacctgctataccagccagggcaggtgcttattccccacaacagccctctgttgtaggcggcagtgccatcctgaaggtgccgtggtaccttctgaagacgcaggctgaggcctgtaatggcactgccatgcacacatggcacaccctctcccggttaaactgcttgcccttcactgggccctggttgcccagggaggtgacgctagggtgcctggctgcgtctcttccacacccacggagaacggagttgtgttctggggtccaggctgccacagcctgctggtataccagagggtgcatcgcagggagtgggcagggccaagagctttcaaatgctccagtggtcttcatattttgcatttgggggagtgggtcagacaatggctgtattgctgctgggtgggtggacaggttgccctgaaaggaggcaagcagcagagcctgacagtcagatgtgggcccactgagcagccatgtggccctggacagagcagatcactgggcctcagtgtcctcaagctgtggagcacagttagtgaaataaaagtgtttcttcccatgctgtcctaaagcgggtgctccgttagatgcctgctccttttcgctttacagatgaggaaactctcacagagaggtgaattaagtggccatccttcatttagcaaatacttgggtccgtgctgggcactggggctcagcagtgaacaccgcagggaggcacctgcacctgagaacttcccttctagaggggagacggggagtcacaagtagacaaaggaggggacctgcaagtagtcatccgggctgtgaaggaggcaggtggggtgtggggacggtgacaggaggagcggccagctcatctggagccagctagttatctgctgtgccagtgttcttgaccccctgcttgtgagctgctgtgctgggtgctggggctgcagacccatgcctggctcccaggggctcgccatctggccgggcggggcaggtgctgtgagcaggtgctgagtgagccctctccttggggcaggagaggtgcatcctgaggaacaggggagcggggagcacgggcaggagctcagaggacgactctggggggactggaagtgagggtggcaggtggagggtcccaggtgggattccaggctggtgagccacggtggtgctgtggcctgaagacagtgtggtatgtgtgtgcccgtaggccggccgtaccgtggcaagcccagtgacatgtgggccctgggcgtggtgctcttcaccatgctgtatggccagttccccttctacgacagcatcccgcaggagctcttccgcaagatcaaggctgccgagtataccattcctgagtgagtcctgcctcccggggggtggggggggcagccagcctgatgggcttaaggcagggaaacggcacagtgagcctgggcatcctggccacagacccagcaccacccactgagccctcctccccaactccctgcctcagggatggacgggtttctgagaacaccgtgtgtctcatccggaagctgctggtccttgacccccagcagcgcctggccgccgccgacgtcctggaggccctcagtgccatcattgcatcatggcagtccctgtcatctctgagtgggcctttgcaagtggttcctgacattgatgaccaaatgagcaatgcggatagctcccaggaggcgaaggtgacggaggagtgctcccagtacgagtttgagaactacatgcgtcagcagctgctgctggccgaggagaagagctccatccatgacgcccggagctgggtacccaagcggcagttcggcagcgcaccaccggtgcgacggctgggccacgacgcacagcccatgacctccttggacacggccatcctggcgcagcgctacctgcggaaataacagcctcagccggggccaccagcactgctgccacttcttccagccccagccaaaggcgtggctgtcagggctgggccctgtagtgctggactctcccgggccacaatagggacagggcagggacagggacagcccaggtcacacgtggggtcagcagaggtaccacgaagctaccttttgggatgattgctcgattgtttggtttttaaatctgagaagcctagataactaatctgcttttaatcacgatgttttaatctacctctgtctctttaaccatgctgtctctggactgagcaagagggaggagggagcctgctcaccccactccagggccttccccagcggccaccaactgacctggggcgctgctccccacagtccaaataagctgaaagtgcagctcgctgcaggccccagagcgagcttcccctcctccctgctctcccaggcccctgccacagcctctttccgtccctctctttctgatccaggcccctcagtccaagctttggaaaaccttcacctcatcttaaaccgaactcaaatatatttatttttttaccataccaacttctctcccatctctaggtggctcagtccatggccactccctgcccccagcctggctggacagcaaggaatccacagcccacacgtgagctccctcctcacccccaggcagggaagcccctcctgccagtccctgtcccctttcagcccaccagtccctctctgctgccggtgatgggaggcctttctagacctggctctttctctcccgtctcagtggcttctctgaggtgctgtacacgcgcgttaacctgttcccttctctatccttccccgtggtactgagctcacgtggactcccagtgcgaaggggcccatgggttgggctgcaggcctggccgtgagcgggggctgcctgcacgctcccctagcctactcttgtgtttaggggatggtgggaacatatcccagtgcccttgcctcataatagatgtggtgactctcccggtagaccctagcaagggtcctccatggtggtgagggactcaggagaattgtagggattgggggaccctgcctgcctggcttgagaacagccctgctgcccttttgagccgagattttgaagtggatgcccgtcttgccagaaatgctgttctcaccagaatgccccctccccttgcccttactggacttggccctgcctgatgccaagcaaagacccttccccagaggcctaccccccatatgtcctcagagaggctgagtgtcccctccaggcagtcatgggccctgaggcccctcctgcctggccctgctccccagtggggaggtgactgtgtttcccagagtgtgagccgctctcctccccctaaaaagctgactcactgtgagtgaccttgggcaagttcccaaacctccttgtgcctcagtttccccatctggaaaaaatggggccacctcttgccagcagtagcagggctgcccacgcccctttctccccatgccccatccagcacttgggcgactcatgcctctgcctcagtgggcctgtgggagcctactggagcccagcacttactccccctgagcagcgagcctgcgtctgtctcagctgtccagcgctgagggccagggtcttgtgctgtggggctgggggatgccctcttttctatatttatttcatagaaagtctcctgcgggagcggaaatgcagtccggcctagggctcccagcccttgactgtcctcctgtgagggcctgaagctgggccagggcccgtcgcagcggagccccctctcagcagcccaccgggtccctccaggctgctgcccgtgcgtggtctttctcctccttttcaaagcaatagccgccgggtctgcaaagccctgtcagacagactgggcccttccaaggtcaagccatgtgtctgatgacattcctggtgaagcaaaggagaggaggatgggtcagccctcactgggtgtcacacactgagagaagtcctattgtaaagaaacggaaaaagtcacaaaaaagtttgtataaagacatatttttgtactacatggggactcttcctgcatgtcagcaataaaacttcctgatctggaaaaaaaaaaaaaaaaaaaaaaaaaaaaaaaaaaag

SEQ ID NO: 3941 - DNA, 3056 bp, Homo sapiens
cttttctttgaatgacagaactacagcataatgcgtggcttcaacctgctcctcttctggggatgttgtgttatgcacagctgggaagggcacataagacccacacggaaaccaaacacaaagggtaataactgtagagacagtaccttgtgcccagcttatgccacctgcaccaatacagtggacagttactattgcgcttgcaaacaaggcttcctgtccagcaatgggcaaaatcacttcaaggatccaggagtgcgatgcaaagatatcaatgagtgcctcaccagcagcgtctgccctgagcattctgactgtgtcaactccatgggaagctacagttgcagctgtcaagttggattcatctctagaaactccacctgtgaagacgtggatgaatgtgcagatccaagagcttgcccagagcatgcaacttgtaataacactgttggaaactactcttgtttctgcaacccaggatttgaatccagcagtggccacttgagtttccagggtctcaaagcatcgtgtgaagatattgatgaatgcactgaaatgtgccccatcaattcaacatgcaccaacactcctgggagctacttttgcacctgccaccctggctttgcaccaagcaatggacagttgaatttcacagaccaaggagtggaatgtagagatattgatgagtgccgccaagatccatcaacctgtggtcctaattctatctgcaccaatgccctgggctcctacagctgtggctgcattgcaggctttcatcccaatccagaaggctcccagaaagatggcaacttcagctgccaaagggttctcttcaaatgtaaggaagatgtgatacccgataataagcagatccagcaatgccaagagggaaccgcagtgaaacctgcatatgtctccttttgtgcacaaataaataacatcttcagcgttctggacaaagtgtgtgaaaataaaacgaccgtagtttctctgaagaatacaactgagagctttgtccctgtgcttaaacaaatatccacgtggactaaattcaccaaggaagagacgtcctccctggccacagtcttcctggagagtgtggaaagcatgacactggcatctttttggaaaccctcagcaaatgtcactccggctgttcggacggaatacttagacattgagagcaaagttatcaacaaagaatgcagtgaagagaatgtgacgttggacttggtagccaagggggataagatgaagatcgggtgttccacaattgaggaatctgaatccacagagaccactggtgtggcttttgtctcctttgtgggcatggaatcggttttaaatgagcgcttcttccaagaccaccaggctcccttgaccacctctgagatcaagctgaagatgaattctcgagtcgttgggggcataatgactggagagaagaaagacggcttctcagatccaatcatctacactctggagaacgttcagccaaagcagaagtttgagaggcccatctgtgtttcctggagcactgatgtgaagggtggaagatggacatcctttggctgtgtgatcctggaagcttctgagacatataccatctgcagctgtaatcagatggcaaatcttgccgttatcatggcgtctggggagctcacgatggacttttccttgtacatcattagccatgtaggcattatcatctccttggtgtgcctcgtcttggccatcgccacctttctgctgtgtcgctccatccgaaatcacaacacctacctccacctgcacctctgcgtgtgtctcctcttggcgaagactctcttcctcgccggtatacacaagactgacaacaagatgggctgcgccatcatcgcgggcttcctgcactaccttttccttgcctgcttcttctggatgctggtggaggctgtgatactgttcttgatggtcagaaacctgaaggtggtgaattacttcagctctcgcaacatcaagatgctgcacatctgtgcctttggttatgggctgccgatgctggtggtggtgatctctgccagtgtgcagccacagggctatggaatgcataatcgctgctggctgaatacagagacagggttcatctggagtttcttggggccagtttgcacagttatagtggtaagcaaatactacaacagcctggcgaagtgtgttctgaaggaggagcaaggagacctgcgagatctggaatttccagggacgtgtgcagctgagaggatcaactcccttctcctgacctggaccttgtggatcctgaggcagaggctttccagtgttaatgccgaagtctcaacgctaaaagacaccaggttactgaccttcaaggcctttgcccagctcttcatcctgggctgctcctgggtgctgggcatttttcagattggacctgtggcaggtgtcatggcttacctgttcaccatcatcaacagcctgcagggggccttcatcttcctcatccactgtctgctcaacggccaggtacgagaagaatacaagaggtggatcactgggaagacgaagcccagctcccagtcccagacctcaaggatcttgctgtcctccatgccatccgcttccaagacgggttaaagtcctttcttgctttcaaatatgctatggagccacagttgaggacagtagtttcctgtaggagcctaccctgaaatctcttctcagcttaacatggaaatgaggatcccaccagccccagaaccctctggggaagaatgttgggggccgtcttcctgtggttgtatgcactgatgagaaatcaggcgtttctgctccaaacgaccattttatcttcgtgctctgcaacttcttcaattccagagtttctgagaacagacccaaattcaatggcatgaccaagaacacctggctaccattttgttttctcctgcccttgttggtgcatggttctaagcgtgcccctccagcgcctatcatacgcctgacacagagaacctctcaataaatgatttgtcgcctgtctgactgatttatcctag

SEQ ID NO: 3942 - DNA, 3155 bp, Homo sapiens
tgatgaggaagggttttaaggtaaggatgtggtgacctagagtcttgtttggtcctgagcaccctctgctggagcagagtaaaagtgactgacagttaaatcttggtttctctaccccagccactcccagtaaggtcctctttactcttgtgttgtttacacattgaaggcatgttctatactgagagagaatagagaaaccaaacagactgacaggacatggtaagacagcatagaaaaacagaagttagtggtttcggctgagggtacagtctttctggtctgatgattatatataggaatctattagccaatgccttaactattttcctctcttcccaaatgaatgatgagactcacccttcattttgatcagttttaaggatttacttcattctctgttcagtcctctgtgtataaagctgaagcagtagaggaagagagaaactccaagtggttgcatgactgctctccactattactgtgccgttgaagctgccagtcgtcatggaaataggcttaaagtttttctgcctcatctcaccatatctcaacagatccagaccagccctggggcaggaactgatgatactgctagtgcagacctagctcaaatcctctgttctttcacagacatgtctgctctgatttcactcaggaaacgtgctcagggggagaagcccttggctggtgctaaaatagtgggctgtacacacatcacagcccagacagcggtgagtttgttggaagaaaagagggacttctgataaggggaagaaagaaatcaattttttttttttcacttttcctttcctaactcgccaacctccaaatgctaactattaataggatctccctgttacacaataatggggttttctgggttttttttttaatatgtaaacccactttcagcaaacttgacctaggaaagtctagatttgcaaacatatgattgttataaaatgttataaagacttctagaaacctatgttttatgcaaagttaaataccagtgcaccacctcgctggagtacacccttttgtaactttccagtgtagcacctgttggtgcagagttgataggtattgctatcttgatgaggcttgctctccattcctgggtggcccttctcttcctcaccctgtcttcctacacttctacacaggtgttgattgagacactctgtgccctgggggctcagtgccgctggtctgcttgtaacatctactcaactcagaatgaagtagctgcagcactggctgaggctggagttgcagtgttcgcttggaagggcgagtcagaagatgacttctggtggtgtattgaccgctgtgtgaacatggatgggtggcaggccaacatgatcctggatgatgggggagacttaacccactgggtttataagaagtatccaaacgtgtttaagaagatccgaggcattgtggaagagagcgtgactggtgttcacaggctgtatcagctctccaaagctgggaagctctgtgttccggccatgaacgtcaatgattctgttaccaaacagaagtttgataacttgtactgctgccgagaatccattttggatggcctgaagaggaccacagatgtgatgtttggtgggaaacaagtggtggtgtgtggctatggtgaggtaggcaagggctgctgtgctgctctcaaagctcttggagcaattgtctacattaccgaaatcgaccccatctgtgctctgcaggcctgcatggatgggttcagggtggtaaagctaaatgaagtcatccggcaagtcgatgtcgtaataacttgcacaggaaataagaatgtagtgacacgggagcacttggatcgcatgaaaaacagttgtatcgtatgcaatatgggccactccaacacagaaatcgatgtgaccagcctccgcactccggagctgacgtgggagcgagtacgttctcaggtggaccatgtcatctggccagatggcaaacgagttgtcctcctggcagagactcagatggatttgcagaaaataggaaaaagcctagagtcctgatctggaactgtaattcttcctcttccaactgagtctagaggggtgtaaagtcctctcccgctttggcttgacttgtatgccattggaatctgagacagagctcatcccagggctctctcttacctttccagggtcgtctactcaatttgagctgctccacagttcccacctttgttctgtccatcacagccacaacacaggctttggcactgatagaactctataatgcacccgaggggcgatacaagcaggatgtgtacttgcttcctaagaaaatggatgaatacgttgccagcttgcatctgccatcatttgatgcccaccttacagagctgacagatgaccaagcaaaatatctgggactcaacaaaaatgggccattcaaacctaattattacagatactaatggaccatactaccaaggaccagtccacctgaaccacacactctaaagaaatattttttaagataacttttattttcttcttactcctttcctcttgatttttttcctataatttcattcttgttttttcatctcattatccaagttctgcagaccacacaggaacttgcttcatggctctttagatgaaatagaagttcagggttcctcactctagtcactaaagaaggattttactctcccagcccagaaaggtgattctttctttaccatttctggggactttagtcttaattaggtaccttattaacaggaaatgctaaggtaccttctctgtggaacaatctgcaatgtctaaatcgccttaaaagagcccatttctcagctgctgaaatcagtgctctttcacctcttcagagaagcagggatggtacctacccggcaggtaggttagatgtgggtggtgcatgttaatttcccttagaagttccaagccctgtttcctgcgtaaaggtggtatgtccagttcagagatgtgtataatgagcatggcttgttaagatcaggaggcccacttggatttatagtatagcccttcctccactcccaccagacttgctcatttttcgagtttttaactagactacactctattgagtttaattttgtcctctaggatttatttctgttgtcc

SEQ ID NO: 3943 - DNA, 2626 bp, Homo sapiens
cagtttatagcctggagtctctgtttccctttcaggtcccggctctcttggctttcccataagcagctgccttgggactctcctggagacctgatgcccacagccaagctgaccacaggagccggtgctggggactgagggaaacttagagttcagagagggggtgtgatttgcctgaggtcacacagcaagttagagacccagctccacgactcattgtcttggctttggccctcgtcatcctgcccacccagcggggcttcccaacccaccacacagccatggacgggaaggtggcagtgcaagagtgtgggcctcctgcagtctcctgggtccccgaggagggagagaagttggaccaggaagacgaggaccaggtgaaggatcggggccaatggaccaacaaggtggagtttgtgctgtcagtggccggggagatcattggtctggcatctgtggtcatcgagtcatatttgaatgtctactacatcatcatccttgcctgggctctcttctacctgttcagctccttcacctctgagctgccctggacgacctgcaacaacttttggaacacagagcattgcacggactttctgaaccactcaggagccggcacagtgaccccatttgagaattttacctcacctgtcatggaattctgggagagacgagttctgggcatcacctcgggcatccatgacctgggctccctgcgctgggagctggccctgtgcctcctgctcgcctgggtcatctgctatttctgcatctggaagggggtcaagtccacaggcaaggtggtttatttcacagccacgtttccgtacctgatgcttgtcattttgctgatcagaggtgtcacccttcccggagcctaccagggcatcatctactacttgaagccagatttgttccgcctcaaggaccctcaggtgtggatggatgcgggcacccagatcttcttctcctttgccatctgccaggggtgcctgacagccctgggcagctacaacaagtatcacaacaactgctacaaggactgcatcgccctctgcttcctgaacagtgccaccagctttgtggctgggtttgttgtcttctccatcctgggcttcatgtcccaagagcaaggggtgcccatttctgaagtggccgagtcaggtcctgggctggccttcatcgccttccccaaggctgtgactatgatgcccttatcccagctgtggtcctgcctgttctttatcatgctcatattcctagggctggacagccagtttgtctgtgtggagtgcctggtgacagcctccatagacatgttccccaggcagctccggaagagcgggcggcgcgagctcctcatcctcaccatcgccgtcatgtgctacctgatagggcttttcctggtcaccgagggcgggatgtacatcttccagctgtttgactactatgcttccagtggcatatgcctgctgttcctgtcattgtttgaagtggtctgcataagctgggtgtatggggcggaccgtttctatgacaacattgaggacatgattggctggttcctggctctgtcctccatggtctgtgtcccactcttcgtcgtcatcaccctcctgaagactcggggtcctttcaggaagcgtctgcgtcagctcatcacccctgactccagtctgccacagcccaagcaacatccctgcttggatggcagtgctggccggaactttgggccctccccaacaagggaaggactgatagccggggagaaggagacccatttgtagggtgtggccagaggccaggcggctcctaagccgggaacctaggtcagggccaccctccattctcagcggacagcctctgcctctgtctcctgccacaatcctgctgggaacctctggagagccacaggcacccccagctggaggccagactcctctcttgtgctagctggagcagctccttcccctttgctgataacaccaccactgggacgtgccatgttgggacgccactccctgtgggaaggcaccatcgtttttataaaggggggtctttttggaggccgccatctgattgcaacacctcgagttatgaggattccactgtggggatgcctcttgttagagcgtactgcatttgtacacggggagaggagctataattggaacgcacactgccgtccaatgtggagagcctgatgggacaataccctgttggaagtgacaactgaacacactgtgttggatcggaggttccgttaggggatccttccttaggcttaacgacagaggcaagcctttgcatgccgtcagtctggagtttcctccgagtctctcatggcatctccagctcctgccctagttccgcactgttcttgcagtgtttcatcaactcctggagcattggaatggaaggggcttgggagatgattcctagacttcacaaacactcggcatgcctccctgcactgtccgttcctctgcccaaggccgatattgctaactgatcacagattctttcccacctcacaatccttccgaatgtgctccaggcagcaccatttgccatcctgcttctaacgcaaacccctgccttagttaacaagtgtgtatggattgcc

SEQ ID NO: 3944 - DNA, 2673 bp, Homo sapiens
ttacatactgcttttaggtagaaaaggggagggcagacagcacttcctgtatctgccatttctccattgccttcagctcaaaataaccaatttgccacagtggcatagtttggagcaatgctctgctcctcttcaaaccttttccttatctcattcaccagtcagccaccaagtcctgttaacctcttctcttgctccaaactgtctacttctctccatccccactgccatgatctagttttgacctccatcatctttctcttagtcttgtgactggtctctctgtctccagtcatatccttttttcagtttattttccatactgtagacagaactttctttctaaaacatgacagtatcacgttcctgctcaaagctgcccatgcacttttcagttttcttaaaacaaaacttaaactccttgacatgtaataaggcctgtgtggctgcacttttgtcttggctccaaggcttctcaagtgtgggagcctgtggaatcctcagcttcctcacctgtgtgtgggaacagcagtacctttctcacagagttgcccatggaataagtggggcagtgcatgcaaagtgcttggcatggtgtctgatagtcaaggctgggtggctgacggttttcaccctggatcttcagaaatggtcatggcccatccctcagaagactgctgaaaggactccaggaaagatgatgacatatagctcttgttcctctccttaggaaaccccactttatgtccagtaagaactcttcatggtgaggattaaagctcatttttctgtttcctatagaaacagcaaatggggtgtgggtgggtgctaaggtgggtttctccctgaaaacctgtccagctgtcgtagggagggctgctgagagcgtggggccctgatgcactatgaggatcagagtacctcctacatgccctggggcccactgagagcttcatcctcccctgctcactcacgggctctgctccagctcagctgccatccggcttcctgctcacagccttgcatctgtgtccttctctgcaggccaaactgcaccttttctttccttcctatcctcttcagttaatgaaactggaccccagctgcttctcatctcatccccctaaaccaatcctcctggaaaatctcctgtctccagggtagtctgtgcaccatagtgcaatgatttttcttcttggtctgctcttgtgactcctggaacccttcgcagaccacagctgcaaacaaaatcctcaacttataatcacagagtgctacataacagtcatgggaaatgtctagtttagggatggtgtgtgtcctggtatctttgcgtttatattcggaaggacttgggagctctaaatatagggttcctgcaatggtaaacaccatcaatagtactcatacctatattaccttcaggactgtagaaccttggaaataattacacttatgatttgtctcagctgtttaagtcaatgccttttatttttagtttttctgaagacaaagctcttataagaatcacagatgaaagatcaggcacaaatcacattttcccccttaataacaaaatacaaatccaataattttagaaaatcagtttttagtgacccagatgcctggagaaaagctgccaggatttttctggtctatcgcagaattttctacatcaatgagaaggatgctgcatatcttggctgtattatttcctaccgtgagaaaagagacttagtatatggaacatgcttttttcagaaaattggcagtaactgactttgaaggaaagttggttaagttggacttgcagctggaacttgggaagcactgtcccctccttacccccgaggaaggagacacagaggcacacttccagtaagttcttggttcagtgggtcactcatgtcttcaacagccagatctcattgcgccgtccgtagggcttcatgggagggtcataacccgtgcagaagtagatgtccccccggtaggtggctgtgccctccagggcagcacgcagacgggtggcttgtgctacgtagtctgcttccttggcataaccaccaaactgcctgggggttcaagagcaagggctggttacgaaaggacatgacctctgagagaggggggatctttagaaaaaagtcactcaccatgtttattatgacaagcatgctagagtggtaagactggggactgagtcaccacttcctagatgggttgattttacctctctgagcctcagtttcctcatctgaaaaaggagatatattttctttttcctctagagttttgagtgttaaaagcagtaatggacgtgaaaaactctaatgcggggcctgaaacagtagctgagtataaacgtgagcctccctttctttcctgaaatacccaaggggacagcaggtttgctttcccaaaggccaagccttcacccttttctctggctccctctactgcccggctgtacctcttttctgctgctctgtcaccacctctggaaggaggaagtctacaggggacttcgggcagagctgcagtgagtatggtggctaatgccccttccacagcagagcagctctagtgactgagttcatcacagcagtgacttgtagcagcttcatttaaaaacagagctaggctagcctgggcaacacaagaccctgtgtc

SEQ ID NO: 3945 - DNA, 3513 bp, Homo sapiens
attttctccgccggctgcgggaaccggttccaggagcgcgggagctcgtctgccaggagacccagccgggagggaccgatgctgcgtgatgcaaccccttcgagggactgagtcaagaaaccaaggctgggggtctcgtggagtcaggcggagctggggattaggactcggggcttgtgtctcccaggcgtgtttttttgttgttgttttgtttttttgccgcaacatcttccttatactgggtggggtgggggcgggggtggtctgtatttccagacctcctccatggtggtctggctgtgtggagggcagggcacagttccttgacttggctcattcccccccaacgccccccctttcttttttttttgagatggagtctcgctctgttgcccaggctggagtgcagtagcgtgatctcggctcactgcaatctccgtctcccgggttcaagcgaatctcctgcctcagcctccagagtagctgggactacaggcacccaccaccacgcccggctaatttttgtatttttagtagagacagggtttcaccatattggccaggctggtctggaactcctgaccttgtgatccgcctgcctcggcctcctaaagtgctgggattacaggcgtgagccaccgcgcctggcaggctcattccctttttatgccttcgtttttgatagatgacctggggatgggagaaatgctgcagaggtggtttatttacagtgaattgttaatttggttgtggggctagtattaggggcacattgggaaaacacaggctgggcagaggttggtaggttcacaacagttatgcccactgggtgctgatggatttgggggctgtcgtcggcctggcttggggccctagtggtggggctacaaggcttgctcctagatctactccaagtgaacatttaagatcagtgacttggatggagacttaaaaaggaagtcagctgactccgtgtagtcatccagagctgtgaggaatgacaagtgcacagtataaaatcaagattctaattgaaggcctccaccatggacagaggccaggccctgcccctcccaggcagcctggctccttctgctgggccctgaaggcagacgggataatgtggttggccaaggcctgttggtccatccagagtgagatgccctgtatccaagcccaatatgggacaccagcaccgagtccgggaccccgtgaccacctggcaagcgaccccctgacccctgagttcatcaagcccaccatggacctggccagccccgaggcagcccccgctgcccccactgccctgcccagcttcagcaccttcatggacggctacacaggagagtttgacaccttcctctaccagctgccaggaacagtccagccatgctcctcagcctcctcctcggcctcctccacatcctcgtcctcagccacctcccctgcctctgcctccttcaagttcgaggacttccaggtgtacggctgctaccccggccccctgagcggcccagtggatgaggccctgtcctccagtggctctgactactatggcagcccctgctcggccccgtcgccctccacgcccagcttccagccgccccagctctctccctgggatggctccttcggccacttctcgcccagccagacttacgaaggcctgcgggcatggacagagcagctgcccaaagcctctgggcccccacagcctccagccttcttttccttcagtcctcccaccggccccagccccagcctggcccagagccccctgaagttgttcccctcacaggccacccaccagctgggggagggagagagctattccatgcctacggccttcccaggtttggcacccacttctccacaccttgagggctcggggatactggatacacccgtgacctcaaccaaggcccggagcggggccccaggtggaagtgaaggccgctgtgctgtgtgtggggacaacgcttcatgccagcattatggtgtccgcacatgtgagggctgcaagggcttcttcaagcgcacagtgcagaaaaacgccaagtacatctgcctggctaacaaggactgccctgtggacaagaggcggcgaaaccgctgccagttctgccgcttccagaagtgcctggcggtgggcatggtgaaggaagttgtccgaacagacagcctgaaggggcggcggggccggctaccttcaaaacccaagcagcccccagatgcctcccctgccaatctcctcacttccctggtccgtgcacacctggactcagggcccagcactgccaaactggactactccaagttccaggagctggtgctgccccactttgggaaggaagatgctggggatgtacagcagttctacgacctgctctccggttctctggaggtcatccgcaagtgggcggagaagatccctggctttgctgagctgtcaccggctgaccaggacctgttgctggagtcggccttcctggagctcttcatcctccgcctggcgtacaggtctaagccaggcgagggcaagctcatcttctgctcaggcctggtgctacaccggctgcagtgtgcccgtggcttcggggaccggattgacagtatcctggccttctcaaggtccctgcacagcttgcttgtcgatgtccctgccttcgcctgcctctctgcccttgtcctcatcaccgaccggcatgggctgcaggagccgcggcgggtggaggagctgcagaaccgcatcgccagctgcctgaaggagcacgtggcagctgtggcgggcgagccccagccagccagctgcctgtcacgtctgttgggcaaactgcccgagctgcggaccctgtgcacccagggcctgcagcgcatcttctacctcaagctggaggacttggtgccccctccacccatcattgacaagatcttcatggacacgctgcccttctgacccctgcctgggaacacgtgtgcacatgcgcactctcatatgccaccccatgtgcctttagtccacggacccccagagcacccccaagcctgggcttgagctgcagaatgactccaccttctcacctgctccaggaggtttgcagggagctcaagcccttggggagggggatgccttcatgggggtgaccccacgatttgtcttatcccccccagcctggccccggcctttatgttttttgtaagataaaccgtttttaacacatagcgccgtgctgtaaataagcccagtgctgctgtaaatacaggaagaaagagcttgaggtgggagcggggctgggaggaagggatgggccccgccttcctgggcagcctttccagcctcctgctggctctctcttcctaccctccttccacatgtacataaactgtcactctaggaagaagacaaatgacagattctgacatttatatttgtgtattttcctggatttatagtatgtgacttttctgattaatatatttaatatattgaataaaaaatagacatgtagttgg

SEQ ID NO: 3946 - DNA, 3435 bp, Homo sapiens
ttccgggtttggtgcggcctttgtctctcgctgcagtcagagctccaggtctggttcttacttctcctaaaggcccaggctgtgtggccccgtgtcctgcaggtattgggagatccacagctaagacaccgggacctcctggaagccaaaaatgggaccattgcaatttagagatgtggccatagaattctctctggaggagtggcattgcctggacactgcacagcggaatttatataggaatgtgatgttagagaactacagtaacctggtcttccttggtattactgtttctaagccagacctgatcacctgtctggagcaaggaagaaaacctttgaccatgaagagaaatgagatgatagccaaaccctcagtaatgtgttctcattttgcccaagacctttggccagagcagagcatgaaagattctttccaaaaagtggtactgagaagatatgaaaaatgtgaacatgacaatttacagttaaaaaaaggatgtataagtgtggatgagtgtaaggtgcacaaagaaggttataatgaacttaaccaatgtttgacaactaccccaagaaaaatatgtcaatgtgataaatatgtgaaagtccttcatcaatttccaaattcaaacggacaaaagagaggacatactgggaaaaaacctttcaaatatatagaatgtggcaaagcttttaagcagttctcaactcttactacacataagaaaattcatactggagggaaaccctacaaatgtgaagaatgtggcaaagcctttaaccactcttgtagccttactagacataagaaaattcatactggagagaaaccctacaaatgtgaagaatgtggcaaagcctttaagcactcctccactcttactacacataagagaaatcatactggagagaaaccctacaagtgtgataaatgtggcaaagcctttatgtcatcctcaacccttagtaaacatgagataattcatacggaaaagaaaccctacaaatgtgaagaatgtggcaaagccttcaaccggtcctcaacccttactacacataagataattcatactggagaaaaaccctacaaatgtgaagaatgtgacaaagcctttaagtactcctatacccttactacacataaaagaattcatactgaagacaaaccctacaaatgtgaagaatgtggcaaagcctttaagtactcctctacccttactacacataagagaattcatactggagagaaaccctacaaatgtgaagaatgtggcaaagccttcaagcggtcttcagaccttactacgcataagataattcatactggagagaaaccctacaaatgtgaagaatgtggcaaagcttttaagtactcctctaaccttactacacataagaaaattcatactggagagagaccctacaaatgtgaagaatgtggcaaagccttcaaccagtcctcaatccttactacacataggagaattcatactggagagaaattctacaaatgtgaagaatgtggcaaagcttttaagtgctcctctaaccttactacacataagaaaattcatactggagagagaccctacaaatgtgaagaatgtggcaaagccttcaaccagtcctcaatccttactacacatgagagaatcatactggagagaaattctacaaatgtgaagaatgtggcaaagccttcaagcggtcctcacaccttactacacataagataattcatactggagagaaattctacaaatgtgaagaatgtgacacagcttttaagcatttctctaaccttactacacataagaaaattcatactggaaaaaaaccctacagatgtgaagaatgtggcaaagcctttaagcactcctctaaacttactacacataagagatttcatactggagagaaaccctacagatgtgaataatgtggtaaagcttttcacctatcctcacaccttactgcacataagataattcatactggagagaaaccatgtgaatgtgatgaatggggaaaatcttttaaccagccctcaatttctaactaagaattgatatgaaatataaactctacaaatataaagaatgtgacagacggacactccatctcaaaaagaaagaaaaaagccagggattacaggcgtgagccaccgcgtccggcctctttttttcttttcttttttttgagacaaagtctcactgtgtcacccagactggaatgcagtgacacaatctcggctcactgaaacctctgccttccaggttcaagctattctcatgcctcagcctctcaagtagctgggactacagatgtgggccaccatgtctggctaattttttttttttttttttttttgtagagacagggtttcgccatgttgacgagactggtctcgaactcctggcctcaagcaatccacccacctcaggctctcaaagtgttgggattataggtgtgagccaatatgtccagcctaattttattttattttttaccatcttaaaactattgtgcatttaatgaagcattattatgccactaactttaacctatccggccttactcaaatggtgtaagcaaaagatggaagaagtatactatttggtatgtagtggaatgtcatcactagtaatcactttgccagtaaactgcaaatgaagaatattgttcccgttagttaaattttcaatcttttttcttaatttattattactatctgtgagtatatagtatgtgtatatatgtcttatagagaatattttgattcaggcatacaatatgtagtaattacattagggtaaataaggtatctgtcacctctagcatttatcctttctaatccaaacagtgtaattatacacttttagttacttttaaatgtccaattaaattgtaattgactacagggtgatttttatggtcataataaaaattatacagaaatataaatagaatatgggctggacgcagtggctcatgcctgtaatcccagcactttggtaggcgacgtcgggcagatcatgaggtcaggagttcaagaccagcctgtcctgggccagggatctctctacaagagcccctgcccctctgttggaggcacagttttagaataaggaggaggagggagaagagaaaatgtaaaggagggagatctttcccaggccgcaccatttctgtcactcacatggacccaagataaaagaatggccaaaccctcacaacccctgatgtttgaagagttccaagttgaagggaaacaaagaagtgtttgatggtgccagagaggggctgctctccagaaagctaaaatttaatttcttttttcctctgagttctgtacttcaaccagcctacaagctggcacttgctaacaaatcagaaatatgacaattaatgattaaagactgtgattgccacc

SEQ ID NO: 3947 - DNA, 4932 bp, Homo sapiens
atgatcatgtcccctgtccacctgctccagccactatccctctcccacttacagcagaagaaagggctggtgagaaaggtggattacaggcccacttctgccactgacgagccctatgaatgtggcctacacccccttagcttcactgggtctcagtttccctatctgtatattgggagcagttgtgaagctcagaagagaaatgtctgtgaaaaggttatgaacaggagggagagtggaaaccaacctgctggatcgtgtccacagaccctggaatggggccacatgcttggtttgtcaaattgcagacgccggccgggtgcgatggctcatgcctgtaatcccagcactttgggaggccgaggcggacagatcacttgaggtcgggagttcgagaccagcctgaccaacatggagaaaccccgtctctactgaaaatacaaaattagccaggcatggtggcacatgcctataatcccagctacttgggaaggctgaggcaggagaatcacttgaacctgggagacggaggttgtggtgagcctagatcgtgccattgtactccagcctgggcaacaagagtgaaactccgtctcaaaaaaaaaaaatttgcagacgccatcccatccaggcctttgctttcactgatgaagaaactgagatacagagagggcagggcacctgttcggagtttatgaaatgcccccccaccattatctttcttgatcatataagaatctggtgaggcaaggtagggcgtgatctttatctctattttatcgttttatttaagcgggaacaggactgctcagtggctgggggccttgcccaagatctccaagtactggggaaccccagggaggccctggggggtggcagtgttcctatttcagccccactctgcttccccctcccaggatatccaggaggtgcagggctacgtgctcatcgctcacaaccaagtgaggcaggtcccactgcagaggctgcggattgtgcgaggcacccagctctttgaggacaactatgccctggccgtgctagacaatggagacccgctgaacaataccacccctgtcacaggggcctccccaggaggcctgcgggagctgcagcttcgaagcctcacagagatcttgaaaggaggggtcttgatccagcggaacccccagctctgctaccaggacacgattttgtggaaggacatcttccacaagaacaaccagctggctctcacactgatagacaccaaccgctctcgggcctgccacccctgttctccgatgtgtaagggctcccgctgctggggagagagttctgaggattgtcagagcctgacgcgcactgtctgtgccggtggctgtgcccgctgcaaggggccactgcccactgactgctgccatgagcagtgtgctgccggctgcacgggccccaagcactctgactgcctggcctgcctccacttcaaccacagtggcatctgtgagctgcactgcccagccctggtcacctacaacacagacacgtttgagtccatgcccaatcccgagggccggtatacattcggcgccagctgtgtgactgcctgtccctacaactacctttctacggacgtgggatcctgcaccctcgtctgccccctgcacaaccaagaggtgacagcagaggatggaacacagcggtgtgagaagtgcagcaagccctgtgcccgagtgtgctatggtctgggcatggagcacttgcgagaggtgagggcagttaccagtgccaatatccaggagtttgctggctgcaagaagatctttgggagcctggcatttctgccggagagctttgatggggacccagcctccaacactgccccgctccagccagagcagctccaagtgtttgagactctggaagagatcacaggttacctatacatctcagcatggccggacagcctgcctgacctcagcgtcttccagaacctgcaagtaatccggggacgaattctgcacaatggcgcctactcgctgaccctgcaagggctgggcatcagctggctggggctgcgctcactgagggaactgggcagtggactggccctcatccaccataacacccacctctgcttcgtgcacacggtgccctgggaccagctctttcggaacccgcaccaagctctgctccacactgccaaccggccagaggacgagtgtggtaagacagggagcccagtgtgcgcactccccatctgccagcacacagcagtgcccagggggccctggcagcagcgttcttggacttgtgcagactgcccgtctctgtgcacccttcttgactcagcacagctctggctggcttggcctcttggcatggcttctctagctgggtcctacctgccttggcatccttccctccccctctgtttctgaaatctcagaactcttcctctccctacatcggccccacctgtccccacccctccagcccacagccatgcccacagccagttccctggttcacttggacctggggcctcccctaaaagtcccctgcggtcccttcctcctcactgcagtgggcgagggcctggcctgccaccagctgtgcgcccgagggcactgctggggtccagggcccacccagtgtgtcaactgcagccagttccttcggggccaggagtgcgtggaggaatgccgagtactgcaggggtatgaggggcggaggagagggtggctggaggggtgcatggggctcctctcagaccccctcaccactgtcccttctctcaggctccccagggagtatgtgaatgccaggcactgtttgccgtgccaccctgagtgtcagccccagaatggctcagtgacctgttttggaccggaggctgaccagtgtgtggcctgtgcccactataaggaccctcccttctgcgtggcccgctgccccagcggtgtgaaacctgacctctcctacatgcccatctggaagtttccagatgaggagggcgcatgccagccttgccccatcaactgcacccactcctgtgtggacctggatgacaagggctgccccgccgagcagagagccaaccctctgacgtccatcgtctctgcggtggttggcattctgctggtcgtggtcttgggggtggtctttgggatcctcatcaagcgacggcagcagaagatccggaagtacacgatgcggagactgctgcaggaaacggagctggtggagccgctgacacctagcggagcgatgcccaaccaggcgcagatgcggatcctgaaagagacggagctgaggaaggtgaaggtgcttggatctggcgcttttggcacagtctacaagggcatctggatccctgatggggagaatgtgaaaattccagtggccatcaaagtgttgagggaaaacacatcccccaaagccaacaaagaaatcttagacgaagcatacgtgatggctggtgtgggctccccatatgtctcccgccttctgggcatctgcctgacatccacggtgcagctggtgacacagcttatgccctatggctgcctcttagaccatgtccgggaaaaccgcggacgcctgggctcccaggacctgctgaactggtgtatgcagattgccaaggggatgagctacctggaggatgtgcggctcgtacacagggacttggccgctcggaacgtgctggtcaagagtcccaaccatgtcaaaattacagacttcgggctggctcggctgctggacattgacgagacagagtaccatgcagatgggggcaaggttaggtgaaggaccaaggagcagaggaggctgggtggagtggtgtctagcccatgggagaactctgagtggccacctccccacaacacacagttggaggacttcctcttctgccctcccaggtgcccatcaagtggatggcgctggagtccattctccgccggcggttcacccaccagagtgatgtgtggagttatggtgtgtgatggggggtgttgggaggggtgggtgaggagccatggctggagggaggatgagagctgggatggggagaattacggggccacctcagcatgtgaagggagggaaggggctgcctgtgccccaccttgcagggtctgtgcacttcccaggattagggaaagaccgggtagggtctgtctcctggcatcacatctccccctgctacctgccatgatgctagactcctgagcagaacctctggctcagtacactaaagctccctctggccctcccactcctgaccctgtctctgccttaggtgtgactgtgtgggagctgatgacttttggggccaaaccttacgatgggatcccagcccgggagatccctgacctgctggaaaagggggagcggctgccccagccccccatctgcaccattgatgtctacatgatcatggtcaaatgtgcgtggctgagctgtgctggctgcctggaggagggtgggaggtcctgggtggaggagcccacaaggggcatgaaaggggaccaggatgtatgtagacccaggagccctagtatgttaggagcctcaaaaccttcttgtatcccttttacagtcaaagtccaaagccactcttgaggaacactcttgtacaaaattaagctgggcacagtggctcatgcctgtaatcccagtacttttggaggctgaggtgggaggatcccttgaagccaggagttcaagaccagcctgggcaacatagtgagatcctatctctacaaaaaataaaaaaattatctgggtgtggtggtgtgtgccagtagtcccagctactcaggagaggctgaggcaggaagatcacttgagcctagtttaaggttgcagtaagctatgattgcaccactgaaatccagcctgggtgacagagcgaaacctcatctcaaaaaaataaaaaagcaaaac

SEQ ID NO: 3948 - DNA, 2404 bp, Homo sapiens
cgttccttcgcacgtgcctctgcgggattcctcgtgggaaagtctcagaaatgtccctaaactgaagaaaagccggggaatgcaaggagagcaaggtcgtaggttgttccgactgctccttaacgacctgcctggcagggaccgactaccctgctcctacccgcagccccatgtggagcaggcatccaccagtgcctccccgcgcttgctagcagtgaacattcctgaagacactctcctctcttatcctgaatcctcgctcccactgcagagacactgcgccttccataggttctccaaggccaaatttgagtccctctttaggacgtatgacaaggacatcacctttcagtattttaagagcttcaaacgagtcagaataaacttcagcaaccccttctccgcagcagatgccaggctccagctgcataagactgagtttctgggaaaggaaatgaagttatattttgctcagaccttacacataggaagctcacacctggctccgccaaatccagacaagcagtttctgatctcccctcccgcctctccgccagtgggatggaaacaagtggaagatgcgaccccagtcataaactatgatctcttatatgccatcaccaagctggggccaggggaaaagtatgaattgcacgcagcgactgacaccactcccagcgtggtggtccatgtatgtgagagtgatcaagagaaggaggaagaagaggaaatggaaagaatgaggagacctaagccaaaaattatccagaccaggaggccggagtacacgccgatccacctcagctgaactggcacgcgacgaggacgcattccaaatcatactcacgggaggaatcttttactgtggaggtggctggtcacgacttcttcggaggtggcagccgagatcggggtggcagaaatcccagttcatgttgctcagaagagaatcaaggccgtgtccccttgttctaatgctgcacaccagttactgttcatggcacccgggaatgacttgggccaatcactgagtttgtggtgatcgcacaaggacatttgggactgtcttgagaaaacagataatgatagtgttttgtacttgttcttttctggtaggttctgtctgtgccaagggcaggttgatcagtgagctcaggagagagcttcctgtttctaagtggcctgcaggggccactctctactggtaggaagaggtaccacaggaagccgcctagtgcagagaggttgtgaaaacagcagcaatgcaatgtggaaattgtagcgtttcctttcttccctcatgttctcatgtttgtgcatgtatattactgatttacaagactaacctttgttcgtatataaagttacaccgttgttgttttacatcttttgggaagccaggaaagcgtttggaaaacgtatcacctttcccagattctcggattctcgactctttgcaacagcacttgcttgcggaactcttcctggaatgcattcactcagcatccccaaccgtgcaacgtgtaacttgtgcttttgcaaaagaagttgatctgaaattcctctgtagaatttagcttatacaattcagagaatagcagtttcactgccaacttttagtgggtgagaaattttagtttaggtgtttgggatcggacctcagtttctgttgtttcttttatgtggtggtttctatacatgaatcatagccaaaaacttttttggaaactgttggttgagatagttggttcttttaccccacgaagacatcaagatacacttgtaaataaagctgatagcatatattcatacctgttgtacacttgggtgaaaagtatggcagtgggagactaagatgtattaacctacctgtgaatcatatgttgtaggaaaagctgttcccatgtctaacaggacttgaattcaaagcatgtcaagtggatagtagatctgtggcgatatgagagggatgcagtgcctttccccattcattcctgatggaattgttatactaggttaacatttgtaatttttttctagttgtaatgtgtatgtctggtaaataggtattatattttggccttacaataccgtaacaatgtttgtcattttgaaatacttaatgccaagtaacaatgcatgctttggaaatttggaagatggttttattctttgagaagcaaatatgtttgcattaaatgctttgattgttcatatcaagaaattgattgaacgttctcaaaccctgtttacggtacttggtaagagggagccggtttgggagagaccattgcatcgctgtccaagtgtttcttgttaagtgcttttaaactggagaggctaacctcaaaatattttttttaactgcattctataataaatgggcacagtatgctccttacag

SEQ ID NO: 3949 - DNA, 1670 bp, Homo sapiens
tttggtttaaaatcgtgatcccagattattcatttaaagcaagtatatggctttgttttttggtctgttttttgtttttgagacagagtctcgctctgttaccaaggctggagtgcagtggcgcgatctcagttcattgcagcctccgcctcctgagttcaagcaattattgtgtcccagtctcctgagttgctgggattacaggcacacaacactacatccggctaaaatttttgtatttttagtagagacagagtttcgccatgttggccaggctggtcttgaactcctgaccccaagtgatctgcctgccgcagtctctcaaagtattgggactacaggcatgagccaccatgcctggctgaaagcaagtatataactttgaagagtatctggatacttaacgtttaatgagtgcactagacaagttgtcatggaagcaaagttaaatcctaagtccgagttggaagcaccatgggtggagctggtcaatatactgcctaacactgtccagctatgataatctgcatggatctctgctaggagacctaaccagtcatggggacatctttgaataaaccagtcagggcagacgtacctttggacaatgccagtgctacacgaatgaatttttttaattttttgtattatagagacagggtctctgttgcccaggctggagtgcagtgacacaattgtagctcactgcagcctgcaattcctgggttcaagagaccctcccacctcagtctcccaagtagctgagactacaggcactcaccacctcatccagctaatattttagtttgtagagatggaggtcttgctatgttgcccaggccggtctcaaactcctggcctcctgaagtactgggattacaggtgtgagccactgcacttggccctacaccgatgaatttttttttttttttttttatagggacagagtcttgctctgtcacccagggtggagtgcagtgagctatgagggtgcctctgtgctccatcctaggcaacagagtgagacgctgtttaaaaaggaaaaaatccttccctagagctagtatcctaaagctgcagagctagcccagacctcattggtttccttgtccttggggtgcttttcctgaatctttgggggtgaagggagtgttgctcccagtccagaggcctgattctgttcggactgggttctcaagacacgaccaggttctcaagacacgagtccccttgttcctccccattaaagggggtttgtcagaagcaagaacagcccctctccccagtcacagcctgaagggaggccccgagagcttcctccttccccccacctgctccttaccttctctgccctgctttttagaactgcagttcattgttttaagggattgggggagggagcctggggacacaaaccttttatacaatacaaagctttgctttttttttttttttcttccttttccctttctcggttctcttctctcctctgaatggctgaagacccctctgccgagggaggttggggattgtgggacaaggtcccttggtgctgatggcctgaaggggcctgagctgtgggcagatgcagttttctgtgggcttggggaacctctcacgttgctgtgtcctggtgagcagcccgaccaataaacctgcttttctaaaag

SEQ ID NO: 3950 - DNA, 2682 bp, Homo sapiens
cgctcgccctggggccgctcagggagccgggacgcgctgcctgggctccgcgcagccgatgacattctgagttcttcctctccataccgggctccacgtctcctgtcttctttacctgatccacaggacccctcaactttcctgtaagggaggctctattaccccgtttttcagagacgagaggtagggctcagagaggtttagttactttccaagatcacacagccagtcagggcagagccgggacacaaccctgtgtctctggcggtggctctatggactcggcccctctgttccccaggccccacctcttccagaacctcctgctcttcctgtgggccctgctgaactgtggtttgggggtcagtgctcagggtccgggcgagtggaccccgtgggtgtcctggacccgctgctccagctcctgcgggcgtggcgtctccgtgcgcagccggcgctgcctccggcttcctggggaagaaccgtgctggggagactcccatgagtaccgcctctgccagttgccagactgccccccaggggctgtgcccttccgagacctacagtgtgccctgtacaatggccgccctgtcctgggcacccagaagacctaccagtgggtgcccttccatggggcgcccaaccagtgcgacctcaactgcctggctgaggggcacgccttctaccacagcttcggccgcgtcctggacggcaccgcctgcagcccgggtgcccagggggtctgcgtggctggccgctgccttagcgccggctgtgatgggttgttgggctcgggtgccctcgaggaccgctgtggccgctgcggaggcgccgacgactcgtgccttttcgtgcagcgcgtgtttcgtgacgccggtgccttcgctgggtactggaacgtgaccctgatccccgagggcgccagacacatccgcgtggaacacaggagccgcaaccacctggcactgatggggggcgatgggcgctacgtgcttaatgggcactgggtggtcagcccaccagggacctacgaggcggccggcacgcatgtggtctacacccgagacacagggccccaggagacattgcaagcagccgggcccacctcccatgacctgctcctacaggtcctcctgcaggagcccaaccctggcatcgagtttgagttctggctccctcgggagcgctacagccccttccaggctcgtgtgcaggccctgggctggcccctgaggcagcctcagccccggggggtggagcctcagccccccgcagcccctgctgtcacccctgcacagaccccaacgctggccccagacccctgcccaccctgccctgacacccgcggccgcgcccaccgactactccactattgcggcagtgactttgtgttccaggcccgagtgctgggccaccaccaccaggcccaggagacccgctatgaggtgcgcatccagctcgtctacaagaaccgctcgccactgcgggcacgcgagtacgtgtgggcgccaggccactgcccctgcccgatgctggcaccccaccgggactacctgatggctgtccagcgtcttgtcagccccgacggcacacaggaccagctgctgctgccccacgccggctacgcccggccctggagccctgcggaggacagccgcatacgcctgactgcccggcgctgtcctggctgagcccctgcaggagccccggccacacacagcaagaaagatacatctgaccagcctcaacgtcaacgtatttcccctctcaccctggcttccaggcagctctgaaatacgtcccacctgtgcagctatgtgactccctcccacacacgcttaagacacctctgcatgcagtcaaagccactgtcacaagccggcaggcactggtgaggaggcactaaggagactctgacttttatttcgcctctctccttggctgccaggaagctcatagctatttatactcagaaagtttaacgctgctttctttctctttgcgcgcgtcacacttgcttggagacactgtcatgaacgagcatgacaccctgctgccctgggtacccagaagatcatctgtttacttcccagacactgtgctgtctctgctctctgctactcacacacaccctcatgtgtgaagggcagagacactgtcacaaacaggcatgccccttagaagacatgcctaaccaggcactgtaacgtaccaacgtaccaatttccccttttcccctggctaccaggaaactcggagacaatcttttcagcctcagcatttctggctggatttccacccatcaacacgtgcttgctcctcctttttttttttttctgaggtagacccttgctctgtcacctaggctgaagtgcggtggtgcaatcatggctcactgcagcctcaaattcctgggctcaagcgatcctcccacctcagcctccacagcagctggaactccaggtgtgaatcaccatgcccggctaacttttaaattttttgtagagatggggtcttgctacgttgcccacactgctctccaactactggcctcaaacgatcctcctgcctcggcctcccaaagcactggaatttcaggcatgcactatcgtactggctgttcaccccccttttattcctctttaatttttacaagcactttttaaaaaaaaattttacttt

SEQ ID NO: 3951 - DNA, 4315 bp, Homo sapiens
tttctgtattccgggttcttgccttggtgtaccagaagaatccgatcacccgtgggctaggagaatgagtgcaacgttttattgagtggaagtagctctcatctgatggtggaatcagcagggagatggttttcccctggagttgggcttctaggtggccccgtctcttctctgactgccctggccaaactccaccttgtcctgccggtcaatggcctgccagcatgccagtgcctctcggtgtgctgttctgctggcgtgctcctcttgacgaccagctgcttgggtcttccaccgaagtgttcctcacaatgtccagccgctcgtgtgtctgcccactagggtctcgggtttttataggcccaggattggggcatggcaggccaaggtggtcttggaaaatggtaacatttgggcatgaaagcaggagtgcctatcctcacctagatctgtgggggtggagccctagccagggacccacctttctctacccagcacttcccctcccgctttccgtatcattttacgggaccacactcttcccttcccagcactcccatatcaatagcacataaaacctttagttctactgaaaatttggagtgaaatctctccatagttagagcacatgtactatttggtaagcttacccttggtaattcatgataccagctgaagacatcaataccaataagtgagaagattcttgccaagggtggaaggatttgcttggtaatatagtaagtagcattcagtctcagagttgggtcctgcaggacttccactgggcgccttacaagctggataagtggtactccgggggtcccataaatgatgacgtatggcactcgctccccaacctgaggctcagagcgccggtcataagtcagcattttcctattcgaattcaaagaaaaaaaccacacccaaatactgttatggaagccatctttctcacaaattaagtcagaattaaacaataataaaacaatgaaaaaactacaaaagacaatttcaaaacagaattactatttctttgagaataatatatatacattttgcttagttgacaccaagtgtagatatcctacaagagtttaaaaattactctgtaaatcactgttacctggaaaataatgagttggctgatatcaactagcttaagatgtattttaggtgggagtggtggctcgtgcctgtaattccagcactttgggaggccaaggatcacctgagcccaggagtttgagaccagcttgggcgacatagcgagacccccatctccacaaaaaaattagccaccataatggtgcacgcctgttgtcccagctgcttgggaggctgatgtgggaggttcgcttgggcctgggaggtcggggctgcagtgagctgtgattgcgccactgctttccagtctgggcgacagagtgagaccctgcctccaggggcaggaaaaagatgtattttatcccctaagaatgagaactaactatcattaaatctatcatgaaagataagagaaaatttacctggttaaactatctgattccagaatgattccatctaaatgctttggtagaacaatattaaggactacctagtgattttgatgtgggaaaaacaaatgaatcaaggactgtgtcacaatttctttgcataagtttctgaaggaaagcccaaaagaggatttcctcttcacatcttacgaagtatgagggaatattcactaactttcagtgaggcttcatgtgcgcaggtaaagaaacaattttgtgtctgtgtctatggactgtcttttcatttgggtcttctagacctgtgcagaatctcaggactatcctggcaaggtactgagggtatcattaccttgtaagttcaagggctggcacacaagctcctggtttataagaaaaacttcctctgtattccttggcaaagataaagtcttgtatgctggcctttccttccagaagcttcatacattgtcgctgaacatactgtttaattagacttatatctctcgtttcaaatagcagctttagagaacgctcaagtatcttaaaacaaaaaagatatgcaagtaaagataaaatatctcctagtatgtttcaccattgttattacactttcaattatgtaactactgggtaacctgctaacctacctaaataatctgttacttacaatgatgggataataaaattattaaaaattgaaagttatttgagactttagagagcttgctatttctaaaaatagaatatcatgtagtttaaggaaaaccatgtggaatgacatgcaaattaacatttgttatgtgataagcaacataaaacacgttaagttttttttttttaatagtcgaagcctctaggtacaagaaaccagacacgatttcatgtattgtttttttatttaccagtatagaaagggtcctgattcagtcacaggaaacacagagaagtttaaagatcaccaggcagtcaaatcaaaatcagcctttttgactttttataaaaatgttgataaataactatgacagaattttctgtgttggaaatttctactaggaaataaccagcatgcagtggatttatgtaagattaattttttttttttttttgagacggagtcttgctctgtcgctcaggctggggtgcggtggcgtgatctcggctcactgcagcctctgcctcccgggttcaagcgactctcctgcctcagcctcccgagtagctgggactacaggcgtgtgccaccacgcccggctaattttttgttttagtggagatggggtttcgccgtgttggccgggatggtctcgatctcctgacctcatgatccgcccgcctcggcctcccaaagtgctgggattataggcgtgagccaccgtgcccggccaagtagattaagttagttctaggtgaaagctctgtgtcttattctgaatactggaaccaatggatatttatacaataagcttattaatttagcttgagtacaattctgcctacagagaaagaaggtactggattatatctcttccagaaatagtgctgaaaaaaatcccaaattcacataatattatatatatgacataatatattgataatattcaatccactatgcttttaatgctctcatcaaacagtatatagaatgctattcccatttataccatttatttttgttttgctatagaaggagtctaggcccgaataaagaaaaagccaaaaaatatcagggttattatggttgagaaatttgagtaatttatagctaattgtttggaaatcttcctaatttgtatttgataatccaaataaatgaaagttcagttaatctggaatggattatgtttctctctttttattttgatggagtctcactctcttgcccaggctgagtgcagtgttgtgatcttggctgtctgcagcctcctcctcccgggttcaagtgattctcacacctcagtctcccgagtagctgggattacaggcatgcgccaccacacccggataatttttgtatttctggtggagatggggtttcactacgttggccaggctggtctcgaactcctgatctcaagtgatctgcctgccttggcctcccaaagtgctgggattacaggcgtgagccaccacaccgggtctgtttgtcttgtttatcctgctctgctttcaggagttgttacactatgacatatatgatctccaggcaataggcaggaaactctcatgtattgctttttagtaatttttgataaaacgtaaggtatgggaggaagtcagaaacttaaggactaaaatcaaataagttgtttttattagaaataaaattctagctactcgggaggctgaggcagaaggattgcttgagctcgggaggtcagggctgcggtgagccaggattggactactgcactccagcctgggtgacaaagtgagaccctgtctcaaacaaacaaaaacaaaataagacactacaaataaaattctcaaaattcatgtagttactcctatagttatattaattatataggctatagttccttcacctagatgcatgtttaagggtagttacattttcaccagacactttagccacttatttcttacagatgaagacaagatagataaaccttaccttagaaacagcagggcaggaatctcttctgactgtttctattccttttgcatcaaatactgggtccttctgatccagtgtttcatacatgtaacccacatacctcttttttgtttgtaaaacacagggcaaatatacctgtggtaaaattaataaaatgcctctt

SEQ ID NO: 3952 - protein, 685 aa, Homo sapiens
MVLVLHHILIAVVQFLRRGQQVFLKPDEPPPPPQPCADSLQDALLSLGSVIDISGLQRAVKEALSAVLPRVETVYTYLLDGESQLVCEDPPHELPQEGKVRFTDEDEHVIQHCFHYTSTVLTSTLAFQKEQKLKCECQALLQVAKNLFTHLDDVSVLLQEIITEARNLSNAEICSVFLLDQNELVAKVFDGGVVDDESYEIRIPADQGIAGHVATTGQILNIPDAYAHPLFYRGVDDSTGFRTRNILCFPIKNENQEVIGVAELVNKINGPWFSKFDEDLATAFSIYCGISIAHSLLYKKVNEAQYRSHLANEMMMYHMKVSDDEYTKLLHDGIQPVAAIDSNFASFTYTPRSLPEDDTSMAILSMLQDMNFINNYKIDCPTLARFCLMVKKGYRDPPYHNWMHAFSVSHFCYLLYKNLELTNYLEDIEIFALFISCMCHDLDHRGTNNSFQVASKSVLAALYSSEGSVMERHHFAQAIAILNTHGCNIFDHFSRKDYQRMLDLMRDIILATDLAHHLRIFKDLQKMAEVGYDRNNKQHHRLLLCLLMTSCDLSDQTKGWKTTRKIAELIYKEFFSQGDLEKAMGNRPMEMMDREKAYIPELQISFMEHIAMPIYKLLQDLFPKAAELYERVASNREHWTKVSHKFTIRGLPSNNSLDFLDEEYEVPDLDGTRAPINGCCSLDAE

SEQ ID NO: 3953 - protein, 563 aa, Homo sapiens
MGPLTFMDVAIEFSLEEWQCLDTAQQNLYRNVMLENYRNLVFLGIAVSNLDLITCLEQGKEPWNMKRHEMVAKPPAMCSHFAKDLRPEQYIKNSFQQVILRRYGKCGYQKGCKSVDEHKLHKGGHKGLNQCVTTTQSKIVQCDKYVKVFHKYSNAKRHKIRHTGKNPFKCKECGKSFCMLSQLTQHEIIHTGEKPYKCEECGKAFKKSSNLTNHKIIHTGEKPYKCEECGKAFNQSSTLTRHKIIHTGEKLYKCEECGKAFNRSSNLTKHKIVHTGEKPYKCEECGKAFKQSSNLTNHKKIHTGEKPYKCGECGKAFTLSSHLTTHKRIHTGEKPYKCEECGKAFSVFSTLTKHKIIHTEEKPYKCEECGKAFNRSSHLTNHKVIHTGEKPYKCEECGKAFTKSSTLTYHKVIHTGKKPYKCEECGKAFSIFSILTKHKVIHTEDKPYKCEECGKTFNYSSNFTNHKKIHTGEKPYKCEECGKSFILSSHLTTHKIIHTGEKPYKCKECGKAFNQSSTLMKHKIIHTGEKPYKCEECGKAFNQSPNLTKHKRIHTKEKPYKCK

SEQ ID NO: 3954 - protein, 1586 aa, Homo sapiens
MEEMRDSYLEEDVYQLQELRRELDRANKNCRILQYRLRKAEQKSLKVAETGQVDGELIRSLEQDLKVAKDVSVRLHHELKTVEEKRAKAEDENETLRQQMIEVEISKQALQNELERLKESSLKRRSTREMYKEKKTFNQDDSADLRCQLQFAKEEAFLMRKKMAKLGREKDELEQELQKYKSLYGDVDSPLPTGEAGGPPSTREAELKLRLKLVEEEANILGRKIVELEVENRGLKAEMEDTRGQQEREGPGRDHAPSIPTSPFGDSLESSTELRRHLQFVEEEAELLRRSISEIEDHNRQLTHELSKFKFEPPREPGWLGEGASPGAGGGAPLQEELKSARLQISELSGKVLKLQHENHALLSNIQRCDLAAHLGLRAPSPRDSDAESDAGKKESDGEESRLPQPKREGPVGGESDSEEMFEKTSGFGSGKPSEASEPCPTELLKAREDSEYLVTLKHEAQRLERTVERLITDTDSFLHDAGLRGGAPLPGPGLQGEEEQGEGDQQEPQLLGTINAKMKAFKKELQAFLEQVNRIGGGLSPLPHLTESSSFLSTVTSVSRDSPIGNLGKELGPDLQSRLKEQLEWQLGPARGDERESLRLRAARELHRRADGDTGSHGLGGQTCFSLELRGPPVLPEQSVSIEELQGQLVQAARLHQEETETFTNKIHKMEEEHLYALRWKELEMHSLALQNTLHERTWSDEKNLMQQELRSLKQNIFLFYVKLRWLLKHWRQGKQMEEEGEEFTEGEHPETLSRLGELGVQGGHQADGPDHDSDRGCGFPVGEHSPHSRVQIGDHSLRLQTADRGQPHKQVVENQQLFSAFKALLEDFRAELREDERARLRLQQQYASDKAAWDVEWAVLKCRLEQLEEKTENKLGELGSSAESKGALKKEREVHQKLLADSHSLVMDLRWQIHHSEKNWNREKVELLDRLDRDRQEWERQKKEFLWRIEQLQKENSPRRGGSFLCDQKDGNVRPFPHQGSLRMPRPVAMWPCADADSIPFEDRPLSKLKESDRCSASENLYLDALSLDDEPEEPPAHRPEREFRNRLPEEEENHKGNLQRAVSVSSMSEFQRLMDISPFLPEKGLPSTSSKEDVTPPLSPDDLKYIEEFNKSWDYTPNRGHNGGGPDLWADRTEVGRAGHEDSTEPFPDSSWYLTTSVTMTTDTMTSPEHCQKQPLRSHVLTEQSGLRVLHSPPAVRRVDSITAAGGEGPFPTSRARGSPGDTKGGPPEPMLSRWPCTSPRHSRDYVEGARRPLDSPLCTSLGFASPLHSLEMSKNLSDDMKEVAFSVRNAICSGPGELQVKDMACQTNGSRTMGTQTVQTISVGLQTEALRGSGVTSSPHKCLTPKAGGGATPVSSPSRSLRSRQVAPAIEKVQAKFERTCCSPKYGSPKLQRKPLPKADQPNNRTSPGMAQKGYSESAWARSTTTRESPVHTTINDGLSSLFNIIDHSPVVQDPFQKGLRAGSRSRSAEPRPELGPGQETGTNSRGRSPSPIGVGSEMCREEGGEGTPVKQDLSAPPGYTLTENVARILNKKLLEHALKEERRQAAHGPPGLHSDSHSLGDTAEPGPMENQTVLLTAPWGL

SEQ ID NO: 3955 - protein, 1331 aa, Homo sapiens
MESHSRAGKSRKSAKFRSISRSLMLCNAKTSDDGSSPDEKYPDPFEISLAQGKEGIFHSSVQLADTSEAGPSSVPDLALASEAAQLQAAGNDRGKTCRRIFFMKESSTASSREKPGKLEAQSSNFLFPKACHQRARSNSTSVNPYCTREIDFPMTKKSAAPTDRQPYSLCSNRKSLSQQLDCPAGKAAGTSRPTRSLSTAQLVQPSGGLQASVISNIVLMKGQAKGLGFSIVGGKDSIYGPIGIYVKTIFAGGAAAADGRLQEGDEILELNGESMAGLTHQDALQKFKQAKKGLLTLTVRTRLTAPPSLCSHLSPPLCRSLSSSTCITKDSSSFALESPSAPISTAKPNYRIMVEVSLQKEAGVGLGIGLCSVPYFQCISGIFVHTLSPGSVAHLDGRLRCGDEIVEISDSPVHCLTLNEVYTILSHCDPGPVPIIVSRHPDPQVSEQQLKEAVAQAVENTKFGKERHQWSLEGVKRLESSWHGRPTLEKEREKNSAPPHRRAQKVMIRSSSDSSYMSGSPGGSPGSGSAEKPSSDVDISTHSPSLPLAREPVVLSIASSRLPQESPPLPESRDSHPPLRLKKSFEILVRKPMSSKPKPPPRKYFKSDSDPQKSLEERENSSCSSGHTPPTCGQEARELLPLLLPQEDTAGRSPSASAGCPGPGIGPQTKSSTEGEPGWRRASPVTQTSPIKHPLLKRQARMDYSFDTTAEDPWVRISDCIKNLFSPIMSENHGHMPLQPNASLNEEEGTQGHPDGTPPKLDTANGTPKVYKSADSSTVKKGPPVAPKPAWFRQSLKGLRNRASDPRGLPDPALSTQPAPASREHLGSHIRASSSSSSIRQRISSFETFGSSQLPDKGAQRLSLQPSSGEAAKPLGKHEEGRFSGLLGRGAAPTLVPQQPEQVLSSGSPAASEARDPGVSESPPPGRQPNQKTLPPGPDPLLRLLSTQAEESQGPVLKMPSQRARSFPLTRSQSCETKLLDEKTSKLYSISSQVSSAVMKSLLCLPSSISCAQTPCIPKEGASPTSSSNEDSAANGSAETSALDTGFSLNLSELREYTEGLTEAKEDDDGDHSSLQSGQSVISLLSSEELKKLIEEVKVLDEATLKQLDGIHVTILHKEEGAGLGFSLAGGADLENKVITVHRVFPNGLASQEGTIQKGNEVLSINGKSLKGTTHHDALAILRQAREPRQAVIVTRKLTPEAMPDLNSSTDSAASASAASDVSVESTEATVCTVTLEKMSAGLGFSLEGGKGSLHGDKPLTINRIFKGAASEQSETVQPGDEILQLGGTAMQGLTRFEAWNIIKALPDGPVTIVIRRKSLQSKETTAAGDS

SEQ ID NO: 3956 - protein, 264 aa, Homo sapiens [sequence omitted]

SEQ ID NO: 3957 - protein, 213 aa, Homo sapiens
MGDGKAPLHTPKAWVSPSIPVLVPGIIVNKAPLEKVPDLISQVLATYPADGEMAEASCGVFWLLSLLGCIKEQQFEQVVALLLQSIRLCQDRALLVNNAYRGLASLVKVSELAAFKVVVQEEGGSGLSLIKETYQLHRDDPEVVENVGMLLVHLASYEEILPELVSSSMKALLQEIKERFTSSLVSDSSAFSKPGLPPGGSPQLGCTTSGGLE

SEQ ID NO: 3958 - protein, 796 aa, Homo sapiens
MPAWEPGVAASCGWRAPPCSPLRLCIAPHPCTPPSSHQGNLTCRLPPRSFGFCRCVWVRTRGPSLPGEQVSLAAHESEGAAAQLGSSPEIDPRRPRCLLPESAQIPQISYASTAPDLSDNSRYDFFSRVVPSDTYQAQAMVDIVRALKWNYVSTVASEGSYGESGVEAFIQKSREDGGVCIAQSVKIPREPKAGEFDKIIRRLLETSNARAVIIFANEDDIRRVLEAARRANQTGHFFWMGSDSWGSKIAPVLHLEEVAEGAVTILPKRMSVRDRERIGQDSAYEQEGKVQFVIDAVYAMGHALHAMHRDLCPGRVGLCPRMDPVDGTQLLKYIRNVNFSGIAGNPVTFNENGDAPGRYDIYQYQLRNDSAEYKVIGSWTDHLHLRIERMHWPGSGQQLPRSICSLPCQPGERKKTVKGMPCCWHCEPCTGYQYQVDRYTCKTCPYDMRPTENRTGCRPIPIIKLEWGSPWAVLPLFLAVVGIAATLFVVITFVRYNDTPIVKASGRELSYVLLAGIFLCYATTFLMIAEPDLGTCSLRRIFLGLGMSISYAALLTKTNRIYRIFEQGKRSVSAPRFISPASQLAITFSLISLQLLGICVWFVVDPSHSVVDFQDQRTLDPRFARGVLKCDISDLSLICLLGYSMLLMVTCTVYAIKTRGVPETFNEAKPIGFTMYTTCIVWLAFIPIFFGTSQSADKLYIQTTTLTVSVSLSASVSLGMLYMPKVYIILFHPEQNVPKRKRSLKAVVTAATMSNKFTQKGNFRPNGEAKSELCENLEAPALATKQTYVTYTNHAI

SEQ ID NO: 3959 - protein, 560 aa, Homo sapiens
MEKGTELLVSPSQSGPGGDQPLLVKHREDSAVVLSLIDTIDTVMGHVSSNLHGSTPQVTVEGSSAMAEFSVAKILPKTVNSSHYRFPAHGQSFIQIPHEAFHRHAWSTVVGLLYHSMHYYLNNIWPAHTKIAEAMHHQDCLLFATSHLISLEVSPPPTLSQNLSGSPLITVHLKHRLTRKQHSEATNSSNRVFVYCAFLDFSSGEGVWSNHGCALTRGNLTYSVCRCTHLTNFAILMQVVPLELARGHQVALSSISYVGCSLSVLCLVATLVTFAVLSSVSTIRNQRYHIHANLSFAVLVAQVLLLISFRLEPGTTPCQVMAVLLHYFFLSAFAWMLVEGLHLYSMVIKVFGSEDSKHRYYYGMGWGFPLLICIISLSFAMDSYGTSNNCWLSLASGAIWAFVAPALFVIVVNIGILIAVTRVISQISADNYKIHGDPSAFKLTAKAVAVLLPILGTSWVFGVLAVNGCAVVFQYMFATLNSLQGLFIFLFHCLLNSEVRAAFKHKTKVWSLTSSSARTSNAKPFHSDLMNGTRPGMASTKLSPWDKSSHSAHRVDLSAV

SEQ ID NO: 3960 - protein, 394 aa, Homo sapiens
MTAGRSQERRAQEMGRGSVQGLDLKGDLEFFTAPMLSLRSFVFVGVGSGLTSSHIPAQRWAEWGQCLAPPARSLLTSGSLCCPRTMNGTYNTCGSSDLTWPPAIKLGFYAYLGVLLVLGLLLNSLALWVFCCRMQQWTETRIYMTNLAVADLCLLCTLPFVLHSLRDTSDTPLCQLSQGIYLTNRYMSISLVTAIAVDRYVAVRHPLRARGLRSPRQAAAVCAVLWVLVIGSLVARWLLGIQEGGFCFRSTRHNFNSMAFPLLGFYLPLAVVVFCSLKVVTALAQRPPTDVGQAEATRKAARMVWANLLVFVVCFLPLHVGLTVRLAVGWNACALLEMIRRALYITSKLSDANCCLDAICYYYMAKEFQEASALAVAPRAKAHKSQDSLCVTLA

SEQ ID NO: 3961 - protein, 422 aa, Homo sapiens
MFRAGAEGAEKEPSPRPECRADPGPGLGFPLGSGLPWPSLLESPGGRILDIPCKVCGDRSSGKHYGVYACDGCSGFFKRSIRRNRTYVCKSGNQGGCPVDKTHRNQCRACRLKKCLEVNMNKDAVQHERGPRTSTIRKQVALYFRGHKEENGAAAHFPSAALPAPAFFTAVTQLEPHGLELAAVSTTPERQTLVSLAQPTPKYPHEVNGTPMYLYEVATESVCESAARLLFMSIKWAKSVPAFSTLSLQDQLMLLEDAWRELFVLGIAQWAIPVDANTLLAVSGMNGDNTDSQKLNKIISEIQALQEVVARFRQLRLDATEFACLKCIVTFKAVPTHSGSELRSFRNAAAIAALQDEAQLTLNSYIHTRYPTQPCRFGKLLLLLPALRSISPSTIEEVFFKKTIGNVPITRLLSDMYKSSDI

SEQ ID NO: 3962 - protein, 102 aa, Homo sapiens
MSNWPLFCFKKQSLKQEEDRPKRRGPAYVMELPKLKLSGVVRLSSYSSPTLQSVLGSGTNGRVPVLRPLKCIPASKKTDPQKDLKPAPQQCRLPTIVRKGGR

SEQ ID NO: 3963 - protein, 205 aa, Homo sapiens
MLPSGQPIQPLPRTCPRRSGPAAAPRARTPGTGPGAATPHAPQATPPSAVAARGPRHPPSELARDPANGPRGGGTLRDPTAAVGRAPGAPGGSRRGRHSPAEKRRGRRARSGRSRSPWCPPIQEAPGCPALGPRPRSARSPRAAASTPPPPHPVPPSSPQPPAQPQPRVTAALRLPSHPRLRPLGASRRPERGTLLKGAMARPLG

SEQ ID NO: 3964 - protein, 213 aa, Homo sapiens
MELHDRVLDVQLCACSLLLHLLGQGIIVNKAPLEKVPDLISQVLATYPADGEMAEASCGVFWLLSLLGCIKEQQFEQVVALLLQSIRLCQDRALLVNNAYRGLASLVKVSELAAFKVVVQEEGGSGLSLIKETYQLHRDDPEVVENVGMLLVHLASYEEILPELVSSSMKALLQEIKERFTSSLVSDSSAFSKPGLPPGGSPQLGCTTSGGLE

SEQ ID NO: 3965 - protein, 199 aa, Homo sapiens [sequence omitted]

SEQ ID NO: 3966 - protein, 600 aa, Homo sapiens
MAASAQVSVTFEDVAVTFTQEEWGQLDAAQRTLYQEVMLETCGLLMSLGCPLFKPELIYQLDHRQELWMATKDLSQSSYPGDNTKPKTTEPTFSHLALPEEVLLQEQLTQGASKNSQLGQSKDQDGPSEMQEVHLKIGIGPQRGKLLEKMSSERDGLGSDDGVCTKITQKQVSTEGDLYECDSHGPVTDALIREEKNSYKCEECGKVFKKNALLVQHERIHTQVKPYECTECGKTFSKSTHLLQHLIIHTGEKPYKCMECGKAFNRRSHLTRHQRIHSGEKPYKCSECGKAFTHRSTFVLHHRSHTGEKPFVCKECGKAFRDRPGFIRHYIIHTGEKPYECIECGKAFNRRSYLTWHQQIHTGVKPFECNECGKAFCESADLIQHYIIHTGEKPYKCMECGKAFNRRSHLKQHQRIHTGEKPYECSECGKAFTHCSTFVLHKRTHTGEKPYECKECGKAFSDRADLIRHLSIHTGEKPYECVECGKAFNRSSHLTRHQQIHTGEKPYECIQCGKAFCRSANLIRHSIIHTGEKPYECSECGKAFNRGSSLTHHQRIHTGRNPTIVTDVGRPFMTAQTSVNIQELLLGKEFLNITTEENLW

SEQ ID NO: 3967 - protein, 243 aa, Homo sapiens
MKEALSTERGKTLVQKKPTMYPEWKSTFDAHIYEGRVIQIVLMRAAEEPVSEVTVGVSVLAERCKKNNGKAEFWLDLQPQAKVLMSVQYFLEDVDCKQSMRSEDEAKFPTMNRRGAIKQAKIHYIKNHEFIATFFGQPTFCSVCKDFVWGLNKQGYKCRRKCLHRPVCTYVPMCAHVCQCLCVCQCLCALRECMHVSFPSVATAAEFSECWGWLAAALENQFCASLPSSAFSDGELVDGNWAQ

SEQ ID NO: 3968 - protein, 959 aa, Homo sapiens
MFFSFVKKGIPLIFEREEAIKEQYTVRRFRGPSCTHELLRLPTSSRCRPLRVLHGEPSQPRWLPDREEPQVQALQQLQGAARVFMPLQALDSAPKPLKGQAQAPQRLQGAARVFMPLQAQVKAKASKPLQMQIKAPPRLRRAARVLMPLQAQVRAPRLLQVQSQVSKKQQAQTQTSEPQDLDQVPEEFQGQDQVPEQQRQGQAPEQQQRHNQVPEQELEQNQAPEQPEVQEQAAEPAQAETEAEEPESLRVNAQVFLPLLSQDHHVLLPLHLDTQVLIPVEGQTEGSPQAQAWTLEPPQAIGSVQALIEGLSRDLLRAPNSNNSKPLGPLQTLMENLSSNRFYSQPEQAREKKSKVSTLRQALAKRLSPKRFRAKSSWRPEKLELSDLEARRQRRQRRWEDIFNQHEEELRQVDKDKEDESSDNDEVFHSIQAEVQIEPLKPYISNPKKIEVQERSPSVPNNQDHAHHVKFSSSVPQRSLLEQAQKPIDIRQRSSQNRQNWLAASESSSEEESPVTGRRSQSSPPYSTIDQKLLVDIHVPDGFKVGKISPPVYLTNEWVGYNALSEIFRNDWLTPAPVIQPPEEDGDYVELYDASADTDGDDDDESNDTFEDTYDHANGNDDLDNQVDQANDVCKDHDDDNNKFVDDVNNNYYEAPSCPRASYGRDGSCKQDGYDGSRGKEEAYRGYGSHTANRSHGGSAASEDNAAIGDQEEHAANIGSERRGSEGDGGKGVVRTSEESGALGLNGEENCSETDGPGLKRPASQDFEYLQEEPGGGNEASNAIDSGAAPSAPDHESDNKDISESSTQSDFSANHSSPSKGSGMSADANFASAILYAGFVEVPEESPKQPSEVNVNPLYVSPACKKPLIHMYEKEFTSEICCGSLWGVNLLLGTRSNLYLMDRSGKADITKLIRRRPFRQIQVLEPLNLLITISGHKNRLRVYHLTWLRNKILNNDPES

SEQ ID NO: 3969 - protein, 523 aa, Homo sapiens [sequence omitted]

SEQ ID NO: 3970 - protein, 576 aa, Homo sapiens
MVSHFMGSLSVLCFLLLLGFQFVCPQPSTQHRKVPQRMAAEGAPEDDGGGGAPGVWGAWGPWSACSRSCSGGVMEQTRPCLPRSYRLRGGQRPGAPARAFADHAVSAVRTSVPLHRSRDETPALAGTDASRQGPTVLRGSRHPQPQGLEVTGDRRSRTRGTIGPGKYGYGKAPYILPLQTDTAHTPQRLRRQKLSSRHSRSQGASSARHGYSSPAHQVPQHGPLYQSDSGPRSGLQAAEAPIYQLPLTHDQGYPAASSLFHSPETSNNHGVGTHGATQSFSQPARSTAISCIGAYRQYKLCNTNVCPESSRSIREVQCASYNNKPFMGRFYEWEPFAEVKGNRKCELNCQAMGYRFYVRQAEKVIDGTPCDQNGTAICVSGQCKSIGCDDYLGSDKVVDKCGVCGGDNTGCQVVSGVFKHALTSLGYHRVVEISEGATKINITEMYKSNNYLALRSRSGRSIINGNWAIDRPGKYEGGGTMFTYKRPNEISSTAGESFLAEGPTNEILDVYMIHQQPNPGVHYEYVIMGTNAISPQVPPHRRPGEPFNGQMVTEGRSQEEGEQKGRNEEKEDLRGE

SEQ ID NO: 3971 - protein, 682 aa, Homo sapiens [sequence omitted]

SEQ ID NO: 3972 - protein, 369 aa, Homo sapiens
MASGAQLPPQPSSSEVSAVQSPGGRPGAGLEETALGVPLPPSPGEAPLPRSNRSRCPGTRQPGAASLHAASAAVPVRPRRGTAPAGKTADAVPAAAPEQAPRPAPQSRKPRNLEGDLDERRLLCHLQLAQDREARLWRGGKPQDEICDAFEEVVLWLLRLQNTFYFSQSTFNLALTIFGRLLISVKVKEKYLHCATITSLRLAAKVNEEEEFIPQVKDFTKHYGSDYSPNELLRMELAILDRLHWDLYIGTPLDFLTIFHALVVLSWPHVLELLPQRNPSLHVASLTRQLQHCMAGHQLLQFKGSTLALVIITLELERLMPGWCAPISDLLKKAQVGDMQYSCCKELVMQQLRSLQSSSCTDNFVSPAN

SEQ ID NO: 3973 - protein, 776 aa, Homo sapiens [sequence omitted]

SEQ ID NO: 3974 - protein, 328 aa, Homo sapiens
MKLWMESHLIVPETRPSPRMMSNQTLVTEFILQGFSEHPEYRVFLFSCFLFLYSGALTGNVLITLAITFNPGLHAPMYFFLLNLATMDIICTSSIMPKALASLVSEESSISYGGCMAQLYFLTWAASSELLLLTVMAYDRYAAICHPLHYSSMMSKVFCSGLATAVWLLCAVNTAIHTGLMLRLDFCGPNVIIHFFCGVPPLLLLSCSSTYVNGVMIVLADAFYGIVNFLMTIASYGFIVSSILKVKTAWGRQKAFSTCSSHLTVVCMYYTAVFYAYISPVSGYSAGKSKLAGLLYTVLSPTLNPLIYTLRNKEVKAALRKLFPFFRN

SEQ ID NO: 3975 - protein, 140 aa, Homo sapiens
MVRYRVRSLSERSHEVYRQQLHGQEQGHHGQEEQGLSPEHVEVYERTHGQSHYRRRHCSRRRLHRIHRRQHRSCRRRKRRSCRHRRRHRRESLGDPLNQNFLSQKAAEPGREHAEGTKLPGPLTPSWKLRKSRPKHQVRP

SEQ ID NO: 3976 - protein, 696 aa, Homo sapiens
MAYGSITFGDVAIDFSHQEWEYLSLVQKTLYQEVMMENYDNLVSLAGHSVSKPDLITLLEQGKEPWMIVREETRGECTDLDSRCEIISDGKMQLYRKHSCVTLHQRIHNGQKPYECKQCQKSFSHLTELMVHQTIHTSEEPDQCEKFRKAFSHLTDLRKHQKINAREKPYECEECGKVFSYPANLAQHGKVHVEKPYECKECGEAFRTSRQLTVHHRFHYGEKPYECKECGKAFSVYGRLSRHQSIHTGEKPFECNKCGKSFRLKAGLKVHQSIHTGEKPHECKECGKAFRQFSHLVGHKRIHTGEKPYECKECGKGFTCRYQLTMHQRIYSGEKHYECKENGEAFSSGHQLTAPHTFESVEKPYKCEECGKAFSVHGRLTRHQGIHSGKKPYECNKCGKSFRLNSSLKIHQNIHTGEKPYKCKECGKAFSQRAHLAHHNRIHTGYKPFECKECGKSFRCASYLVIHERIHTGEKPYVCQECGKGFSYSHKLTIHRRVHTGEKPYECKECGKAFSVSGQLTQHLSIHSGKRPFECNKCGKSFRFISVLKAHQNIHSAEKPYECKECGKAFRHATSLIYHDRTHAGEKSYECKECGETFSHASHLIIHERIHTSDKPYECKRCGKAFHCASYLVRHESVHADGNPYMCEECGKAFNSSHELSIHHRVHTGEKPFKCNKCRRSFRLRSILEVHQRIHI

SEQ ID NO: 3977 - protein, 669 aa, Homo sapiens [sequence omitted]

SEQ ID NO: 3978 - protein, 695 aa, Homo sapiens
MAYGSITFGDVAIDFSHQEWEYLSLVQKTLYQEVMMENYDNLVSLGHSVSKPDLITLLEQGKEPWMIVREETRGECTDLDSRCEIISDGKMQLYRKHSCVTLHQRIHNGQKPYECKQCQKSFSHLTELMVHQTIHTSEEPDQCEKFRKAFSHLTDLRKHQKINAREKPYECEECGKVFSYPANLAQHGKVHVEKPYECKECGEAFRTSRQLTVHHRFHYGEKPYECKECGKAFSVYGRLSRHQSIHTGEKPFECNKCGKSFRLKAGLKVHQSIHTGEKPHECKECGKAFRQFSHLVGHKRIHTGEKPYECKECGKGFTCRYQLTMHQRIYSGEKHYECKENGEAFSSGHQLTAPHTFESVEKPYKCEECGKAFSVHGRLTRHQGIHSGKKPYECNKCGKSFRLNSSLKIHQNIHTGEKPYKCKECGKAFSQRAHLAHHNRIHTGYKPFECKECGKSFRCASYLVIHERIHTGEKPYVCQECGKGFSYSHKLTIHRRVHTGEKPYECKECGKAFSVSGQLTQHLSIHSGKRPFECNKCGKSFRFISVLKAHQNIHSAEKPYECKECGKAFRHATSLIYHDRTHAGEKSYECKECGETFSHASHLIIHERIHTSDKPYECKRCGKAFHCASYLVRHESVHADGNPYMCEECGKAFNSSHELSIHHRVHTGEKPFKCNKCRRSFRLRSILEVHQRIHI

SEQ ID NO: 3979 - protein, 173 aa, Homo sapiens
MGLRQGNGTVSLGILATDPAPPTEPSSPTPCLRDGRVSENTVCLIRKLLVLDPQQRLAAADVLEALSAIIASWQSLSSLSGPLQVVPDIDDQMSNADSSQEAKVTEECSQYEFENYMRQQLLLAEEKSSIHDARSWVPKRQFGSAPPVRRLGHDAQPMTSLDTAILAQRYLRK

SEQ ID NO: 3980 - protein, 867 aa, Homo sapiens [sequence omitted]

SEQ ID NO: 3981 - protein, 317 aa, Homo sapiens
MRLALHSWVALLFLTLSSYTSTQVLIETLCALGAQCRWSACNIYSTQNEVAAALAEAGVAVFAWKGESEDDFWWCIDRCVNMDGWQANMILDDGGDLTHWVYKKYPNVFKKIRGIVEESVTGVHRLYQLSKAGKLCVPAMNVNDSVTKQKFDNLYCCRESILDGLKRTTDVMFGGKQVVVCGYGEVGKGCCAALKALGAIVYITEIDPICALQACMDGFRVVKLNEVIRQVDVVITCTGNKNVVTREHLDRMKNSCIVCNMGHSNTEIDVTSLRTPELTWERVRSQVDHVIWPDGKRVVLLAETQMDLQKIGKSLES

SEQ ID NO: 3982 - protein, 501 aa, Homo sapiens [sequence omitted]

SEQ ID NO: 3983 - protein, 126 aa, Homo sapiens [sequence omitted]

SEQ ID NO: 3984 - protein, 652 aa, Homo sapiens [sequence omitted]

SEQ ID NO: 3985 - protein, 528 aa, Homo sapiens
MGPLQFRDVAIEFSLEEWHCLDTAQRNLYRNVMLENYSNLVFLGITVSKPDLITCLEQGRKPLTMKRNEMIAKPSVMCSHFAQDLWPEQSMKDSFQKVVLRRYEKCEHDNLQLKKGCISVDECKVHKEGYNELNQCLTTTPRKICQCDKYVKVLHQFPNSNGQKRGHTGKKPFKYIECGKAFKQFSTLTTHKKIHTGGKPYKCEECGKAFNHSCSLTRHKKIHTGEKPYKCEECGKAFKHSSTLTTHKRNHTGEKPYKCDKCGKAFMSSSTLSKHEIIHTEKKPYKCEECGKAFNRSSTLTTHKIIHTGEKPYKCEECDKAFKYSYTLTTHKRIHTEDKPYKCEECGKAFKYSSTLTTHKRIHTGEKPYKCEECGKAFKRSSDLTTHKIIHTGEKPYKCEECGKAFKYSSNLTTHKKIHTGERPYKCEECGKAFNQSSILTTHRRIHTGEKFYKCEECGKAFKCSSNLTTHKKIHTGERPYKCEECGKAFNQSSILTTHERIILERNSTNVKNVAKPSSGPHTLLHIR

SEQ ID NO: 3986 - protein, 435 aa, Homo sapiens
MPTASSLVHLDLGPPLKVPCGPFLLTAVGEGLACHQLCARGHCWGPGPTQCVNCSQFLRGQECVEECRVLQGYEGRRRGWLEGCMGLLSDPLTTVPSLRLPREYVNARHCLPCHPECQPQNGSVTCFGPEADQCVACAHYKDPPFCVARCPSGVKPDLSYMPIWKFPDEEGACQPCPINCTHSCVDLDDKGCPAEQRANPLTSIVSAVVGILLVVVLGVVFGILIKRRQQKIRKYTMRRLLQETELVEPLTPSGAMPNQAQMRILKETELRKVKVLGSGAFGTVYKGIWIPDGENVKIPVAIKVLRENTSPKANKEILDEAYVMAGVGSPYVSRLLGICLTSTVQLVTQLMPYGCLLDHVRENRGRLGSQDLLNWCMQIAKGMSYLEDVRLVHRDLAARNVLVKSPNHVKITDFGLARLLDIDETEYHADGGKVR

SEQ ID NO: 3987 - protein, 242 aa, Homo sapiens [sequence omitted]

SEQ ID NO: 3988 - protein, 110 aa, Homo sapiens [sequence omitted]

SEQ ID NO: 3989 - protein, 471 aa, Homo sapiens
MDSAPLFPRPHLFQNLLLFLWALLNCGLGVSAQGPGEWTPWVSWTRCSSSCGRGVSVRSRRCLRLPGEEPCWGDSHEYRLCQLPDCPPGAVPFRDLQCALYNGRPVLGTQKTYQWVPFHGAPNQCDLNCLAEGHAFYHSFGRVLDGTACSPGAQGVCVAGRCLSAGCDGLLGSGALEDRCGRCGGADDSCLFVQRVFRDAGAFAGYWNVTLIPEGARHIRVEHRSRNHLALMGGDGRYVLNGHWVVSPPGTYEAAGTHVVYTRDTGPQETLQAAGPTSHDLLLQVLLQEPNPGIEFEFWLPRERYSPFQARVQALGWPLRQPQPRGVEPQPPAAPAVTPAQTPTLAPDPCPPCPDTRGRAHRLLHYCGSDFVFQARVLGHHHQAQETRYEVRIQLVYKNRSPLRAREYVWAPGHCPCPMLAPHRDYLMAVQRLVSPDGTQDQLLLPHAGYARPWSPAEDSRIRLTARRCPG

SEQ ID NO: 3990 - protein, 149 aa, Homo sapiens [sequence omitted]

SEQ ID NO: 3991 - RNA, 30 nt, Artificial Sequence
  Description of Artificial Sequence: an artificially synthesized oligo-cap linker sequence
agcaucgagucggccuuguuggccuacugg

SEQ ID NO: 3992 - DNA, 42 bp, Artificial Sequence
  Description of Artificial Sequence: an artificially synthesized oligo(dT) primer sequence
gcggctgaagacggcctatgtggccttttttttttttttttt

SEQ ID NO: 3993 - DNA, 21 bp, Artificial Sequence
  Description of Artificial Sequence: an artificially synthesized primer sequence
agcatcgagtcggccttgttg

SEQ ID NO: 3994 - DNA, 21 bp, Artificial Sequence
  Description of Artificial Sequence: an artificially synthesized primer sequence
gcggctgaagacggcctatgt
